(19) United States
(12) Patent Application Publication
(10) Pub. No.: US 2012/0094906 A1
(43) Pub. Date: Apr. 19, 2012

(54) MODIFIED ERYTHROPOIETIN (EPO) POLYPEPTIDES THAT EXHIBIT INCREASED PROTEASE RESISTANCE AND PHARMACEUTICAL COMPOSITIONS THEREOF

(75) Inventors: Thierry Guyon, Palaiseau (FR); Gilles Borrelly, Combs-la-ville (FR); Xavier Gallet, Champhol (FR); Lila Drittanti, Bahia Blanca (AR); Manuel Vega, Bahia Blanca (AR)

(73) Assignee: Hanall Biopharma Co. Ltd

(21) Appl. No.: 12/736,959

(22) PCT Filed: May 29, 2009
(86) PCT No.: PCT/EP2009/003862

§ 371 Date: Aug. 4, 2011

Related U.S. Application Data
(60) Provisional application No. 61/130,376, filed on May 29, 2008.

(51) Int. Cl. A61K 38/18; C12N 15/12; C12N 15/63; A61P 7/06; C12N 1/19; C12N 5/10; C12N 1/13; C07K 14/505; C12N 1/21

(52) U.S. Cl. 514/7.7; 530/380; 536/23.1; 435/320.1; 435/252.33; 435/254.21; 435/254.23; 435/348; 435/257.2; 435/414; 435/412; 435/419; 435/360; 435/352; 435/325

(57) ABSTRACT

Modified erythropoietin (EPO) polypeptides and other modified therapeutic polypeptides are provided. The EPO polypeptides and other therapeutic polypeptides are modified to exhibit physical properties and activities that differ from the unmodified EPO polypeptides and other unmodified therapeutic polypeptides, respectively. Nucleic acid molecules encoding these polypeptides also are provided. Also provided are methods of treatment and diagnosis using the polypeptides.

### RELATED APPLICATIONS

[0001] Benefit of priority is claimed to U.S. Provisional Application Ser. No. 61/130,376, to Thierry Guyon, Gilles Borrelly, Xavier Gallet, Lila Drittanti and Manuel Vega, entitled “Modified Erythropoietin (EPO) Polypeptides that Exhibit Increased Protease Resistance and Pharmaceutical Compositions Thereof,” filed May 29, 2008. Where permitted, the subject matter of the above-noted application is incorporated by reference in its entirety.

[0002] This application is related to U.S. application Ser. No. 11/998,387, to Thierry Guyon, Giles Borrelly, Xavier Gallet, Lila Drittanti and Manuel Vega, entitled “MODIFIED ERYTHROPOIETIN POLYPEPTIDES AND USES THEREOF,” filed Nov. 28, 2007 and to International Application No. PCT/GB2007/004520, to Thierry Guyon, Giles Borrelly, Xavier Gallet, Lila Drittanti and Manuel Vega, entitled “MODIFIED ERYTHROPOIETIN POLYPEPTIDES AND USES THEREOF,” both of which claim priority to U.S. Provisional Application Ser. No. 60/861,615, filed Nov. 28, 2006.

[0003] This application also is related to U.S. application Ser. No. 11/176,830, to Rene Gantier, Thierry Guyon, Manuel Vega and Lila Drittanti, entitled “RATIONAL EVOLUTION OF CYTOKINES FOR HIGHER STABILITY, THE CYTOKINES AND ENCODING NUCLEIC ACID MOLECULES,” filed Jul. 6, 2005 and published as U.S. Application No. US 2006-0020116, which is a continuation of U.S. application Ser. No. 10/658,834, to Rene Gantier, Thierry Guyon, Manuel Vega and Lila Drittanti entitled “RATIONAL EVOLUTION OF CYTOKINES FOR HIGHER STABILITY, THE CYTOKINES AND ENCODING NUCLEIC ACID MOLECULES,” filed Sep. 8, 2003 and published as U.S. Application No. US-2004-0132977-A1. This application also is related to U.S. application Ser. No. 11/196,067, to Rene Gantier, Thierry Guyon, Hugo Cruz Ramos, Manuel Vega and Lila Drittanti entitled “RATIONAL DIRECTED PROTEIN EVOLUTION USING TWO-DIMENSIONAL RATIONAL MUTAGENESIS SCANNING,” filed Aug. 2, 2005 and published as U.S. Application No. US-2006-0020396-A1, which is a continuation of U.S. application Ser. No. 10/658,355, to Rene Gantier, Thierry Guyon, Hugo Cruz Ramos, Manuel Vega and Lila Drittanti entitled “RATIONAL DIRECTED PROTEIN EVOLUTION USING TWO-DIMENSIONAL RATIONAL MUTAGENESIS SCANNING”, filed Sep. 8, 2003 and published as U.S. Application No. US 2005-0202438.

[0004] This application also is related to U.S. application Ser. No. 10/658,834, filed Sep. 8, 2003, and to published International PCT Application WO 2004/022593, to Rene Gantier, Thierry Guyon, Manuel Vega and Lila Drittanti entitled, “RATIONAL EVOLUTION OF CYTOKINES FOR HIGHER STABILITY, THE CYTOKINES AND ENCODING NUCLEIC ACID MOLECULES.” This application also is related to U.S. application Ser. No. 10/658,355, filed Sep. 8, 2003, and to International PCT Application WO 2004/022747, to Rene Gantier, Thierry Guyon, Hugo Cruz Ramos, Manuel Vega and Lila Drittanti entitled “RATIONAL DIRECTED PROTEIN EVOLUTION USING TWO-DIMENSIONAL RATIONAL MUTAGENESIS SCANNING.”

[0005] The subject matter of each of the above-referenced applications is incorporated by reference in its entirety.

### FIELD OF INVENTION

[0006] Modified erythropoietin (EPO) polypeptides are provided. The EPO polypeptides are modified to exhibit physical properties and activities that differ from the corresponding unmodified EPO polypeptides. Nucleic acid molecules encoding these polypeptides also are provided. Also provided are methods of treatment and diagnosis using the polypeptides.

### BACKGROUND

[0007] Effective delivery of therapeutic proteins for clinical use is a challenge to pharmaceutical science. Once in the blood stream, these proteins are constantly eliminated from circulation within a short time by different physiological processes, involving metabolism as well as clearance using normal pathways for protein elimination, such as filtration in the kidneys (e.g., glomerular) or proteolysis in blood. Once in the luminal gastrointestinal tract, these proteins are constantly digested by luminal proteases. The latter can be a limiting process affecting the half-life of proteins used as therapeutic agents in per-oral administration or subcutaneous, intravenous or intramuscular injection. The problems associated with these routes of administration of proteins are known and various strategies have been used in attempts to solve them. In addition, many therapeutic proteins are glycosylated, and production of glycosylated therapeutic proteins can be costly, highly variable and often difficult to achieve. Production of non-glycosylated forms of such proteins is often not possible due to protein degradation.

[0008] A protein family that has been the focus of clinical work and effort to improve its administration and bio-assimilation is the cytokine family, which includes erythropoietin (EPO). Recombinantly produced EPO polypeptides have been approved for treatment of variety of anemias, such those caused by renal failure, chronic inflammation, cancer, and AIDS; however, there is still an urgent need for more stable forms of erythropoietin for therapy. Erythropoietin has a relatively short plasma half-life (Spivak, J. L. and Hogans, B. B., Blood 73(1): 90-99 (1989); McMahon, F. G., et al., Blood 76(9): 1718-1722 (1990)); therefore, therapeutic plasma levels are rapidly lost, and repeated intravenous administrations must be made. Since naturally occurring variants can have undesirable side effects in addition to the problems of administration, bioavailability, and short half-life, there is a need to improve properties of EPO for its use as a biotherapeutic agent. Therefore, among the objects herein, it is an object to provide modified EPO polypeptides and other therapeutic polypeptides that have improved therapeutic properties.

### SUMMARY

[0009] Provided are pharmaceutical compositions formulated for oral administration. The compositions contain a modified therapeutic polypeptide, or an active fragment of the modified polypeptide such that the modification is in the active fragment. The modified therapeutic polypeptide or active fragment thereof can be glycosylated, partially glycosylated or de-glycosylated (i.e. not glycosylated, such as by removal of glycosylation moieties, inhibition of glycosylation, and expression in a host, such as a bacterial host, that does not glycosylate the polypeptide. The therapeutic polypeptide or active fragment thereof is a polypeptide that contains at least one glycosylation site; contains one or more amino acid modifications at a masked residue identified for protease resistance and designated as a masked is-HIT residue(s) identified for protease resistance; and the therapeutic polypeptide or active fragment thereof exhibits increased protease resistance compared to the unmodified therapeutic polypeptide or active fragment thereof that does not contain the one or more amino acid modifications. The masked is-HIT residue can be an is-HIT residues that occurs within 0-25 \acute{Å}, such as within 1, 2, 3, 4, 5, 6, 7, 8, 9, 10, 11, 12, 13, 14, 15, 16, 17, 18, 19, 20, 21, 22, 23, 24 or 25 \acute{Å}, of a glycosylation site on the polypeptide. The modified therapeutic polypeptide or active fragment thereof in the pharmaceutical composition can contain 1, 2, 3, 4, 5, 6, 7, 8, 9, 10, 11, 12, 13, 14, 15, 16, 17, 18, 19, 20 or more amino acid modifications at masked is-HIT residue. It can contain 2, 3, 4, 5, 6, 7, 8, 9, 10, 11, 12, 13, 14, 15, 16, 17, 18, 19, 20 or more amino acid modifications at masked is-HIT residues. In some embodiments of the pharmaceutical compositions, the modified therapeutic polypeptides or active fragments thereof contain at least two amino acid modifications, where two amino acid modifications are at masked is-HIT residues masked by different glycosylation sites.

[0010] The modified therapeutic polypeptide or active fragment thereof can be a cytokine or active fragment thereof. Cytokines include, but are not limited to, erythropoietin (EPO), interleukin-1β (IL-1), interleukin-2 (IL-2), interleukin-3 (IL-3), interleukin-4 (IL-4), interleukin-5 (IL-5), interleukin-6 (IL-6) interleukin-9 (IL-9), interferon-beta (IFN-β), interferon-gamma (IFN-γ), granulocyte-colony stimulating factor (G-CSF), granulocyte macrophage-colony stimulating factor (GM-CSF), macrophage-colony stimulating factor (M-CSF), thrombopoietin (TPO), leukemia inhibitory factor (LIF), stem cell factor (SCF), oncostatin M (OSM) and vascular endothelial growth factor (VEGF). Exemplary of such therapeutic polypeptide are any selected from among polypeptides that include any of SEQ ID NOS: 2, 237 274, 276, 278, 280, 282, 284, 286, 288, 290, 292, 294, 296, 298, 300, 302, 304 and 306, an active fragment thereof, or an allelic, species of other variant of a polypeptide whose sequence is set forth in any of SEQ ID NOS: 2, 237 274, 276, 278, 280, 282, 284, 286, 288, 290, 292, 294, 296, 298, 300, 302, 304 and 306.

[0011] When the modified therapeutic polypeptide or active fragment thereof is an erythropoietin (EPO) polypeptide set forth in SEQ ID NO:2 or SEQ ID NO:237, or is an allelic or species variant thereof or other variant that has at least or at least about 60%, 70%, 75%, 80%, 85%, 90%, 95%, 96%, 97%, 98%, 99% or more sequence identity with a polypeptide having the sequence set forth in SEQ ID NO: 2 or 237. The masked is-HIT residue in the EPO polypeptide can be at a residue that is masked by glycosylation at one or more glycosylation sites selected from among N24, N38, N83 and S126. Such masked is-Hit residue include, but are not limited to residues R14, L16, L17, E18, K20, E21, E23, E31, L35, E37, P42, D43, E62, W64, L67, L69, L70, E72, L75, R76, L80, L81, P87, W88, E89, P90, L91, L93, D96, K97, P121, P122, D123, P129, L130, R131, D136, F138, R139, K140, L141, F142, R143 and Y145 corresponding to amino acid residues in SEQ ID NO:2 or SEQ ID NO:237 or at corresponding residues in allelic and species variants and other residues. Exemplary of polypeptides where masked is-HIT residues is/are modified, include modified EPO polypeptides or active fragments, wherein the modification one or more amino acid modification(s) selected from among R14H, R14Q, L16I, L16V, L17I, L17V, E18Q, E18H, E18N, K20Q, K20T, K20N, E21Q, E21H, E21N, E23Q, E23H, E31Q, E31H, L35V, L35I, E37Q, E37H, P42S, P42A, D43Q, D43H, E62Q, E62H, W64S, W64H, L67I, L67V, L69V, L69I, L70I, L70V, E72Q, E72H, L75V, L75I, R76H, R76Q, L80V, L80I, L81I, L81V, P87S, P87A, W88S, W88H, E89Q, E89H, P90S, P90A, L91I, L91V, L93V, L93I, D96Q, D96H, K97Q, K97T, P121S, P121A, P122S, P122A, D123H, D123N, P129S, P129A, L130V, L130I, R131H, R131Q, D136Q, D136H, D136N, F138I, F138V, R139H, R139Q, K140N, K140Q, L141I, L141V, F142I, F142V, R143H, R143Q, Y145H and Y145I, such as K20Q, L80I, P90S, L93I, L93V, D96Q, D123N, L130I, R131H, R131Q, D136N, R139H, R139Q, R143H and R143Q, or K20Q, L80I, L93I, L93V and R139H and corresponding modifications in allelic, species and other variants. For example, the modified therapeutic polypeptide or active fragment thereof can be a modified EPO where the modification is selected from among R139H; L93I; K20Q/R139H; K20Q/R139H/L93I; L80I/R139H/L93I; K20Q/R139H/L80I; K20Q/R139H/L93V; K20Q/L80I/R139H/L93I; R139H/L80I; R139H/L93V; R139H/L93I; K20Q; K20Q/L93I; L80I; L93V; K20Q/L80I; and K20Q/L93V, such as R139H, R139H/K20Q, K20Q/R139H/L93I; L80I/R139H/L93I; K20Q/R139H/L80I; K20Q/R139H/L93V; K20Q/L80I/R139H/L93I; R139H/L80I; R139H/L93V and R139H/L93I, and corresponding modifications in allelic, species and other variants.

[0012] The modified therapeutic polypeptide or active fragment thereof can further contain one or more amino acid modifications at un-masked is-HIT residues, as well as other modifications that increase protease resistance or that alter another property or activity of the polypeptide. When the modified therapeutic polypeptide or active fragment thereof is an erythropoietin (EPO) polypeptide, exemplary un-masked is-HIT residues can be selected from among amino acid residues P2, P3, R4, L5, C7, D8, R10, L12, E13, Y15, C29, K45, F48, Y49, W51, K52, R53, M54, E55, L102, R103, L105, L108, L109, R110, L112, K116, E117, F148, L149, R150, K152, L153, K154, L155, Y156, E159, R162, D165, and R166 corresponding to SEQ ID NO:2 or 237 and corresponding modifications in allelic, species and other variants. Exemplary modifications at an un-masked is-HIT residue include P2A, P3S, P3A, R4H, R4Q, L5I, L5V, C7S, C7V, C7A, C7I, C7T, D8Q, D8H, D8N, R10H, R10Q, L12V, L12I, E13Q, E13H, E13N, Y15H, Y151, C29S, C29V, C29A, C29I, C29T, K45Q, K45T, K45N, F48I, F48V, Y49H, Y491, W51S, W51H, K52Q, K52T, K52N, R53H, R53Q, M54V, M54I, E55Q, E55H, E55N, E62N, L102V, L102I, R103H, R103Q, L105I, L105V, L108I, L108V, L109I, L109V, R110H, R110Q, L112V, L112I, K116Q, K116T, K116N, E117Q, E117H, E117N, D123Q, F148I, F148V, L1491, L149V, R150H, R150Q, K152Q, K152T, K152N, L153I, L153V, K154Q, K154T, K154N, L155V, L155I, Y156H, Y156I, E159Q, E159H, E159N, R162H, R162Q, D165Q, D165H, D165N, R166H, and R166Q, such as R4H; F48I; K52Q; K116T; R150H; E159N; K116N; K45N; K52N; D165Q; D165H; D165N; R166H; and L153V or R4H, K52N, L153V and E159N and corresponding modifications in allelic, species and other variants. Exemplary modified therapeutic polypeptide or active fragment thereof. Exemplary of such modified therapeutic polypeptides or active fragments thereof are those with modifications selected from among R139H/R4H; R139H/K52N; R139H/L153V; R139H/E159N; K20Q/R139H/R4H; K20Q/R139H/K52N; K20Q/R139H/L153V; K20Q/R139H/E159N; L80I/R139H/R4H; L80I/R139H/E159N; L80I/R139H/K52N; L80I/R139H/L153V; L93V/R139H/R4H; L93V/R139H/E159N; L93V/R139H/K52N; L93V/R139H/L153V; R4H/K20Q/L93I/R139H; K20Q/L93I/R139H/E159N; K20Q/L93I/R139H/K52N; K20Q/L93I/R139H/L153V; R4H/K20Q/L80I/R139H; K20Q/L80I/R139H/E159N; K20Q/K52N/80I/R139H; K20Q/L80I/R139H/L153V; K20Q/L93V/R139H/R4H; K20Q/L93V/R139H/E159N; K20Q/L93V/R139H/K52N; K20Q/L93V/R139H/L153V; L93I/R139H/E159N; L93I/R139H/K52N; L93I/R139H/L153V; L93I/R139H/R4H; K20Q/L153V; K20Q/E159N; K20Q/R4H; K20Q/K52N; K20Q/L80I/R139H/E159N/R4H; K20Q/L80I/R139H/E159N/K52N; K20Q/L80I/R139H/L153V/E159N; K20Q/L80I/R139H/E159N/L93I; K20Q/L80I/R139H/L153V/R4H; K20Q/K52N/L80I/R139H/L153V; K20Q/L80I/R139H/L153V/L93I; K20Q/R139H/E159N/R4H; K20Q/R139H/E159N/K52N; K20Q/R139H/E159N/L153V; K20Q/L93I/R139H/E159N/R4H; K20Q/L93I/R139H/E159N/K52N; K20Q/L93I/R139H/E159N/L153V; R4H/K20Q/K52N/L80I/R139H; R4H/K20Q/L80I/R139H/L93I; K20Q/R139H/L153V/R4H; K20Q/R139H/K52N/L153V; R4H/K20Q/L93I/R139H/K52N; R4H/K20Q/L93I/R139H/L153V; K20Q/L93V/R139H/E159N/R4H; K20Q/L93V/R139H/E159N/K52N; and K20Q/R139H/R4H/K52N, such as R139H/R4H; R139H/K52N; R139H/L153V; R139H/E159N; K20Q/R139H/R4H; K20Q/R139H/K52N; K20Q/R139H/L153V; K20Q/R139H/E159N; L80I/R139H/R4H; L80I/R139H/E159N; L80I/R139H/K52N; L80I/R139H/L153V; L93V/R139H/R4H; L93V/R139H/E159N; L93V/R139H/K52N; L93V/R139H/L153V; R4H/K20Q/L93I/R139H; K20Q/L93I/R139H/E159N; K20Q/L93I/R139H/K52N; K20Q/L93I/R139H/L153V; R4H/K20Q/L80I/R139H; K20Q/L80I/R139H/E159N; K20Q/L80I/R139H/L153V; K20Q/L93V/R139H/R4H; K20Q/L93V/R139H/E159N; K20Q/L93V/R139H/K52N; K20Q/L93V/R139H/L153V; L93I/R139H/E159N; L93I/R139H/K52N; L93I/R139H/L153V; L93I/R139H/R4H; K20Q/L80I/R139H/E159N/R4H; K20Q/L80I/R139H/E159N/K52N; K20Q/L80I/R139H/L153V/E159N; K20Q/L80I/R139H/E159N/L93I; K20Q/L80I/R139H/L153V/R4H; K20Q/L80I/R139H/L153V/L93I; K20Q/R139H/E159N/R4H; K20Q/R139H/E159N/K52N; K20Q/R139H/E159N/L153V; K20Q/L93I/R139H/E159N/R4H; K20Q/L93I/R139H/E159N/K52N; K20Q/L93I/R139H/E159N/L153V; R4H/K20Q/L80I/R139H/L93I; K20Q/R139H/L153V/R4H; K20Q/R139H/K52N/L153V; R4H/K20Q/L93I/R139H/K52N; R4H/K20Q/L93I/R139H/L153V; K20Q/L93V/R139H/E159N/R4H; K20Q/L93V/R139H/E159N/K52N; and K20Q/R139H/R4H/K52N or K20Q/R139H/R4H; K20Q/R139H/K52N; K20Q/R139H/L153V; K20Q/R139H/E159N; L80I/R139H/L153V; R4H/K20Q/L93I/R139H; K20Q/L93I/R139H/E159N; K20Q/L93I/R139H/K52N; K20Q/L93I/R139H/L153V; R4H/K20Q/L80I/R139H; K20Q/L80I/R139H/E159N; K20Q/L80I/R139H/L153V; K20Q/L93V/R139H/E159N; K20Q/L80I/R139H/E159N/R4H; K20Q/L80I/R139H/E159N/K52N; K20Q/L80I/R139H/E159N/L93I; K20Q/L80I/R139H/L153V/R4H; K20Q/L80I/R139H/L153V/L93I; K20Q/R139H/E159N/R4H; K20Q/R139H/E159N/K52N; K20Q/R139H/E159N/L153V; K20Q/L93I/R139H/E159N/R4H; K20Q/L93I/R139H/E159N/K52N; K20Q/L93I/R139H/E159N/L153V; R4H/K20Q/L80I/R139H/L93I; K20Q/R139H/L153V/R4H; K20Q/R139H/K52N/L153V; R4H/K20Q/L93I/R139H/K52N; R4H/K20Q/L93I/R139H/L153V; K20Q/L93V/R139H/E159N/R4H; K20Q/L93V/R139H/E159N/K52N; and K20Q/R139H/R4H/K52N, and in particular, K20Q/L80I/R139H/E159N; K20Q/L80I/R139H/E159N/R4H; K20Q/L80I/R139H/E159N/K52N; K20Q/L80I/R139H/L153V/R4H; K20Q/R139H/E159N/K52N; K20Q/R139H/E159N/L153V; K20Q/L93I/R139H/E159N/R4H; K20Q/L93I/R139H/E159N/K52N; K20Q/L93I/R139H/E159N/L153V; K20Q/L93V/R139H/E159N/K52N, and corresponding modifications in allelic, species and other variants.

[0013] The modified EPO polypeptides or active fragments thereof in the pharmaceutical compositions formulated for oral administration can further include or more amino modifications at one or more of glycosylation sites N24, N38 and N83, where the modification eliminates the glycosylation at the site. Such modifications include amino acid replacements at residues selected from among N24H, N38H, N83H, N24K, N38K and N83K and corresponding modifications in allelic, species and other variants.

[0014] Also provided are particular modified erythropoietin (EPO) polypeptides and/or polypeptides that are active fragments thereof. Where active fragments are provided, the modifications occur therein. The modified polypeptides can be formulated in pharmaceutic compositions, including those for oral and parenteral administration or any suitable route of administration. The modified EPO polypeptides and/or active fragment thereof can be used to treat any disease or disorder amenable to treatment with EPO. The modified erythropoietin (EPO) polypeptides and/or polypeptides that are active fragments thereof provided herein, in addition to the modifications noted below, also can include one or more amino modifications at one or more of glycosylation sites N24, N38 and N83, where the modification eliminates the glycosylation at the site, such as a amino acid replacements selected from among N24H, N38H, N83H, N24K, N38K and N83K.

[0015] The modified EPO polypeptides provided herein include those that are 160, 161, 162, 163, 164, 165 or 166 amino acids in length. The unmodified EPO polypeptide can be polypeptide having or containing the sequence of amino acids set forth in SEQ ID NO: 2 or 237, or can be an allelic or species variant or other variant that has at least or at least about 60%, 70%, 75%, 80%, 85%, 90%, 95%, 96%, 97%, 98%, 99% or more sequence identity with the polypeptide having the sequence set forth in SEQ ID NO: 2 or 237. The modified EPO polypeptide or active fragment thereof can retain one or more activities of the unmodified polypeptide. The modified erythropoietin (EPO) polypeptides and/or polypeptides that are active fragments thereof can contain modifications in addition to those set forth below, where the modification is one or more of carboxylation, hydroxylation, hasylation, carbamylation, sulfation, phosphorylation, albumination, oxidation, or conjugation to a polyethylene glycol (PEG) moiety. The modified erythropoietin (EPO) polypeptides and/or polypeptides that are active fragments thereof can contain modifications in addition to those set forth below, where the additional amino acid modification(s) that contribute(s) to altered immunogenicity, carboxylation, hydroxylation, hasylation, carbamylation, sulfation, phosphorylation, oxidation, PEGylation or protease resistance of the modified therapeutic polypeptide. Provided are modified erythropoietin (EPO) polypeptides and/or polypeptides that are active fragments thereof that contain one or more amino acid modifications in an EPO polypeptide, allelic variant or species variant or other variant thereof at a masked is-HIT residue(s), where the one or more amino acid modifications at a masked is-HIT residue are selected from among R14H, L16I, L16V, L17I, L17V, E18Q, E18H, E18N, K20Q, K20T, K20N, E21Q, E21H, E21N, E23Q, E23H, E23N, E31Q, E31H, E31N, L35V, L35I, E37Q, E37H, P42S, D43Q, D43H, E62Q, E62H, E62N, W64S, W64H, L67I, L67V, L69V, L69I, L70I, L70V, L80V, L80I, L81I, L81V, P87A, W88S, W88H, E89Q, E89H, E89N, P90S, L91I, L91V, L93V, L93I, D96Q, D96H, D96N, K97Q, K97T, K97N, D123H, D136Q, D136H, D136N, R139H, R139Q, K140N, K140Q, L141I, L141V, R143H, R143Q and Y145H corresponding to residues set forth in SEQ ID NO:2 or 237; and the modified EPO polypeptide exhibits increased protease resistance compared to the unmodified EPO polypeptide that does not comprise the one or more amino acid modifications. The modification at any of the above-noted masked is-HIT residues can be the only modification.

[0016] Also provided are modified erythropoietin (EPO) polypeptides and/or polypeptides that are active fragments thereof that contain two or more amino acid modifications in an EPO polypeptide, or allelic or species variant or other variant thereof, at a masked is-HIT residue(s), where: the two or more amino acid modifications are at a masked is-HIT residue selected from among R14H, R14Q, L16I, L16V, L17I, L17V, E18Q, E18H, E18N, K20Q, K20T, K20N, E21Q, E21H, E21N, E23Q, E23H, E31Q, E31H, L35V, L35I, E37Q, E37H, P42S, P42A, D43Q, D43H, E62Q, E62H, W64S, W64H, L67I, L67V, L69V, L69I, L70I, L70V, E72Q, E72H, L75V, L75I, R76H, R76Q, L80V, L80I, L81I, L81V, P87S, P87A, W88S, W88H, E89Q, E89H, P90S, P90A, L91I, L91V, L93V, L93I, D96Q, D96H, K97Q, K97T, P121S, P121A, P122S, P122A, D123H, D123N, P129S, P129A, L130V, L130I, R131H, R131Q, D136Q, D136H, D136N, F138I, F138V, R139H, R139Q, K140N, K140Q, L141I, L141V, F142I, F142V, R143H, R143Q, Y145H and Y1451 corresponding to residues set forth in SEQ ID NO:2 or 237; and the modified EPO polypeptide exhibits increased protease resistance compared to the unmodified EPO polypeptide that does not comprise the two or more amino acid modification(s). Exemplary of such polypeptides are those that contain any of the following modifications: K20Q/R139H; K20Q/R139H/L93I; L80I/R139H/L93I; K20Q/R139H/L80I; K20Q/R139H/L93V; K20Q/L80I/R139H/L93I; R139H/L80I; R139H/L93V; R139H/L93I; K20Q/L93I; K20Q/L80I; and K20Q/L93V.

[0017] Also provided are modified erythropoietin (EPO) polypeptides and/or EPO polypeptides that are active fragments thereof containing comprising one or more amino acid modifications in the EPO polypeptide, or an allelic or species variant or other variant thereof, at a masked is-HIT residue, and a further modification(s) at an un-masked is-HIT residue, where the one or more amino acid modifications at a masked is-HIT residue are selected from among R14H, R14Q, L16I, L16V, L17I, L17V, E18Q, E18H, E18N, K20Q, K20T, K20N, E21Q, E21H, E21N, E23Q, E23H, E31Q, E31H, L35V, L35I, E37Q, E37H, P42S, P42A, D43Q, D43H, E62Q, E62H, W64S, W64H, L67I, L67V, L69V, L69I, L70I, L70V, E72Q, E72H, L75V, L751, R76H, R76Q, L80V, L80I, L81I, L81V, P87S, P87A, W88S, W88H, E89Q, E89H, P90S, P90A, L91I, L91V, L93V, L93I, D96Q, D96H, K97Q, K97T, P121S, P121A, P122S, P122A, D123H, D123N, P129S, P129A, L130V, L130I, R131H, R131Q, D136Q, D136H, D136N, F138I, F138V, R139H, R139Q, K140N, K140Q, L141I, L141V, F142I, F142V, R143H, R143Q, Y145H and Y1451 corresponding to residues set forth in SEQ ID NO:2 or 237; the one or more amino acid modifications at an un-masked residue are selected from among P2A, P3S, P3A, R4H, R4Q, L51, L5V, C7S, C7V, C7A, C7I, C7T, D8Q, D8H, D8N, R10H, R10Q, L12V, L12I, E13Q, E13H, E13N, Y15H, Y151, C29S, C29V, C29A, C29I, C29T, K45Q, K45T, K45N, F48I, F48V, Y49H, Y49I, W51S, W51H, K52Q, K52T, K52N, R53H, R53Q, M54V, M54I, E55Q, E55H, E55N, E62N, L102V, L102I, R103H, R103Q, L105I, L105V, L108I, L108V, L109I, L109V, R110H, R110Q, L112V, L112I, K116Q, K116T, K116N, E117Q, E117H, E117N, D123Q, F148I, F148V, L149I, L149V, R150H, R150Q, K152Q, K152T, K152N, L153I, L153V, K154Q, K154T, K154N, L155V, L155I, Y156H, Y156I, E159Q, E159H, E159N, R162H, R162Q, D165Q, D165H, D165N, R166H, and R166Q; and the modified EPO polypeptide exhibits increased protease resistance compared to the unmodified EPO polypeptide that does not comprise the two or more amino acid modification(s). Exemplary of such polypeptides and active fragments thereof are any that contain modifications selected from among: R139H/R4H; R139H/K52N; R139H/L153V; R139H/E159N; K20Q/R139H/R4H; K20Q/R139H/K52N; K20Q/R139H/L153V; K20Q/R139H/E159N; L80I/R139H/R4H; L80I/R139H/E159N; L80I/R139H/K52N; L80I/R139H/L153V; L93V/R139H/R4H; L93V/R139H/E159N; L93V/R139H/K52N; L93V/R139H/L153V; R4H/K20Q/L93I/R139H; K20Q/L93I/R139H/E159N; K20Q/L93I/R139H/K52N; K20Q/L93I/R139H/L153V; R4H/K20Q/L80I/R139H; K20Q/L80I/R139H/E159N; K20Q/K52N/80I/R139H; K20Q/L80I/R139H/L153V; K20Q/L93V/R139H/R4H; K20Q/L93V/R139H/E159N; K20Q/L93V/R139H/K52N; K20Q/L93V/R139H/L153V; L93I/R139H/E159N; L93I/R139H/K52N; L93I/R139H/L153V; L93I/R139H/R4H; K20Q/L153V; K20Q/E159N; K20Q/R4H; K20Q/K52N; K20Q/L80I/R139H/E159N/R4H; K20Q/L80I/R139H/E159N/K52N; K20Q/L80I/R139H/L153V/E159N; K20Q/L80I/R139H/E159N/L93I; K20Q/L80I/R139H/L153V/R4H; K20Q/K52N/L80I/R139H/L153V; K20Q/L80I/R139H/L153V/L93I; K20Q/R139H/E159N/R4H; K20Q/R139H/E159N/K52N; K20Q/R139H/E159N/L153V; K20Q/L93I/R139H/E159N/R4H; K20Q/L93I/R139H/E159N/K52N; K20Q/L93I/R139H/E159N/L153V; R4H/K20Q/K52N/L80I/R139H; R4H/K20Q/L80I/R139H/L93I; K20Q/R139H/L153V/R4H; K20Q/R139H/K52N/L153V; R4H/K20Q/L93I/R139H/K52N; R4H/K20Q/L93I/R139H/L153V; K20Q/L93V/R139H/E159N/R4H; K20Q/L93V/R139H/E159N/K52N; and K20Q/R139H/R4H/K52N, such as K20Q/L80I/R139H/E159N; K20Q/L80I/R139H/E159N/R4H; K20Q/L80I/R139H/E159N/K52N; K20Q/L80I/R139H/L153V/R4H; K20Q/R139H/E159N/K52N; K20Q/R139H/E159N/L153V; K20Q/L93I/R139H/E159N/R4H; K20Q/L93I/R139H/E159N/K52N; K20Q/L93I/R139H/E159N/L153V; K20Q/L93V/R139H/E159N/K52N.

[0018] Also provided are modified erythropoietin (EPO) polypeptides and/or polypeptides that are active fragments thereof that contain one or more amino acid modifications in an EPO polypeptide modified erythropoietin (EPO) polypeptides and/or polypeptides that are active fragments thereof. or allelic or species variant or other variant thereof, wherein modification is selected from among K20Q/R139H/R4H; K20Q/R139H/K52N; K20Q/R139H/E159N; L80I/R139H/R4H; L80U/R139H/L93I; L80I/R139H/E159N; L80I/R139H/K52N; L80I/R139H/L153V; L93V/R139H/R4H; L93V/R139H/E159N; L93V/R139H/K52N; L93V/R139H/L153V; R4H/K20Q/L93I/R139H; K20Q/L93I/R139H/K52N; K20Q/L93I/R139H/L153V; K20Q/L80I/R139H/L93I; K20Q/K52N/L80I/R139H; K20Q/L93V/R139H/R4H; K20Q/L93V/R139H/E159N; K20Q/L93V/R139H/K52N; K20Q/L93V/R139H/L153V; L93I/R139H/E159N; L93I/R139H/K52N; L93I/R139H/L153V; L93I/R139H/R4H; K20Q/L93I; K20Q/L153V; K20Q/E159N; K20Q/R4H; K20Q/K52N; K20Q/L80I/R139H/E159N/R4H; K20Q/L80I/R139H/E159N/K52N; K20Q/L80I/R139H/L153V/E159N; K20Q/L80I/R139H/E159N/L93I; K20Q/L80I/R139H/L153V/R4H; K20Q/K52N/L80I/R139H/L153V; K20Q/L80I/R139H/L153V/L93I; K20Q/R139H/E159N/R4H; K20Q/R139H/E159N; K52N; K20Q/R139H/E159N/L153V; K20Q/L93I/R139H/E159N/R4H; K20Q/L93I/R139H/E159N/K52N; K20Q/L93I/R139H/E159N/L153V; R4H/K20Q/K52N/L80I/R139H; R4H/K20Q/L80I/R139H/L93I; K20Q/R139H/L153V/R4H; K20Q/R139H/K52N/L153V; R4H/K20Q/L93I/R139H/K52N; R4H/K20Q/L93I/R139H/L153V; K20Q/L93V/R139H/E159N/R4H; K20Q/L93V/R139H/E159N/K52N; K20Q/L80I; K20Q/L93V; and K20Q/R139H/R4H/K52N.

[0019] Also provided are modified erythropoietin (EPO) polypeptides and/or polypeptides that are active fragments thereof that contain two or more modifications in an EPO polypeptide, or allelic variant, species variant or other variant thereof, where at least one modification is R4H corresponding to amino acid residue set forth in SEQ ID NO:2 or SEQ ID NO:237. The other modification(s) can be selected from among P2S, P2A, P3S, P3A, R4Q, L5I, L5V, C7S, C7V, C7A, C71, C7T, D8Q, D8H, D8N, R10H, R10Q, L12V, L12I, E13Q, E13H, E13N, R14H, R14Q, Y15H, Y151, L16I, L16V, L17I, L17V, E18Q, E18H, E18N, K20Q, K20T, K20N, E21Q, E21H, E21N, E23Q, E23H, E23N, C29S, C29V, C29A, C291, C29T, E31Q, E31H, E31N, L35V, L35I, E37Q, E37H, E37N, P42S, P42A, D43H, K45T, W51S, W51H, K52T, M54V, M54I, E62Q, E62H, E62N, W64S, W64H, L67I, L67V, L69V, L69I, L70I, L70V, L80V, L80I, L81I, L81V, P87S, P87A, W88S, W88H, E89Q, E89H, E89N, P90S, P90A, L91I, L91V, L93V, L93I, D96Q, D96H, D96N, K97Q, K97T, K97N, L102V, L102I, R103H, R103Q, L105I, L105V, L108I, L108V, L109I, L109V, R110H, R110Q, L112V, L112I, K116Q, K116T, K116N, E117Q, E117H, E117N, D123H, D136Q, D136H, D136N, F138I, F138V, R139H, R139Q, K140N, K140Q, L141I, L141V, F142I, F142V, R143H, R143Q, Y145H, Y145I, F148I, F148V, L1491, L149V, R150H, R150Q, K152Q, K152T, K152N, L153I, L153V, K154Q, K154T, K154N, L155V, L155I, Y156H, Y156I, E159Q, E159H, E159N, D165H, R166H, and R166Q, such as K20Q; F48I; K52Q; L80I; P90S; L93V; L93I; D96Q; K116T; L130I; R131H; R131Q; R143H; R143Q; R150H; D123N; D136N; E159N; K116N; K45N; K52N; D165Q; D165H; D165N; R166H; L16I; L16V; R139H; R139Q; and L153V or K20Q; F48I; K52Q; L80I; L93V; L93I; K116T; L130I; R131H; R143H; R143Q; R150H; D123N; E159N; K116N; K45N; K52N; D165H; D165N; L16I; R139H; R139Q; and L153V. Exemplary EPO polypeptides and active fragments thereof are those with modifications at or corresponding to R4H/R150H; R4H/R143H; R4H/E159N; R4H/R139H; R4H/R139Q; R4H/L93I; R4H/D96Q; R4H/L130I; R4H/L153V; R4H/K20Q; R4H/F48I; R4H/R131Q; R4H/K45N; R4H/K52N; R4H/K52Q; R4H/L80I; R4H/K116T; R4H/D123N; R4H/D136N; R4H/P90S; R4H/D165Q; R4H/D165H; R4H/D165N; R4H/K116N; R4H/R143H; R4H/R166H; R4H/L16I; R4H/L16V; R4H/L93I/R143Q; R4H/L93I/R150H; R4H/R143Q/R150H and R4H/L93I/E159N.

[0020] Also provided are modified erythropoietin (EPO) polypeptides and/or polypeptides that are active fragments thereof that have modifications at or at positions in allelic or species variants or other variants of the polypeptides of SEQ ID NO. 2 or 237

[0021] A modified EPO polypeptide, comprising one or more amino acid modifications in an EPO polypeptide, or allelic or species variant or other variant thereof, wherein the modified EPO polypeptide is selected from among R4H/R150H; R4H/R143H; R4H/E159N; R4H/R139H; R4H/R139Q; R4H/L93I; R4H/D96Q; R4H/L130I; R4H/L153V; R4H/K20Q; R4H/F48I; R4H/R131Q; R4H/K45N; R4H/K52N; R4H/K52Q; R4H/L80I; R4H/K116T; R4H/D123N; R4H/D136N; R4H/P90S; R4H/D165Q; R4H/D165H; R4H/D165N; R4H/K116N; R4H/R143H; R4H/R166H; R4H/L16I; R4H/L16V; R4H/L93I/R143Q; R4H/L93I/R150H; R4H/R143Q/R150H; R4H/L93I/E159N.

[0022] Also provided are nucleic acid molecules encoding any of the modified erythropoietin (EPO) polypeptides and/or polypeptides that are active fragments thereof that are provided herein. Vectors containing the nucleic acid molecules and cells containing the vectors and or nucleic acid molecules are provided. The cells can be a prokaryotic cell or a eukaryotic cell, including mammalian cells and algal cells.

[0023] Also provided are pharmaceutical compositions containing any of the modified erythropoietin (EPO) polypeptides and/or polypeptides that are active fragments thereof provided herein and/or the nucleic acids, vectors and/or cells. The pharmaceutical compositions can be formulated for any route of administration, such as for oral, parenteral, intravenous, intradermal, subcutaneous, buccal, inhalation, intramuscular, rectal or topical administration. For example, the composition can be in the form of a liquid, a solution, a suspension, an aerosol, a tablet, a lozenge or a capsule, such as an enterically coated tablet or capsule. The pharmaceutical formulation can be formulated for oral administration to the gastrointestinal tract.

[0024] In all embodiments herein, including the pharmaceutical compositions and methods and modified polypeptides the following embodiments can be selected. Where the modified therapeutic polypeptide is EPO, it can be 160, 161, 162, 163, 164, 165 or 166 amino acids in length. The unmodified polypeptide can be the EPO polypeptide whose sequence of amino acids is set forth in SEQ ID NO: 2 or 237. The modified therapeutic polypeptides, which exhibits increased protease resistance, can retain one or more activities or other properties of the unmodified therapeutic polypeptide under the same conditions as the modified therapeutic polypeptide, including where the unmodified therapeutic polypeptide that is fully glycosylated. The modified therapeutic polypeptide or active fragment thereof can exhibit increased protease resistance to a protease of the digestive tract. The increased protease resistance can be exhibited by the modified therapeutic polypeptide when it is administered orally or is present in the digestive tract. The modified therapeutic polypeptide or active fragment thereof can include further modifications, including, for example, one or more of carboxylation, hydroxylation, hasylation, carbamylation, sulfation, phosphorylation, albumination, oxidation, or conjugation to a polyethylene glycol (PEG) moiety. The modified therapeutic polypeptide or active fragment thereof can contain one or more additional amino acid modifications that contributes to altered immunogenicity, carboxylation, hydroxylation, hasylation, carbamylation, sulfation, phosphorylation, oxidation, PEGylation or protease resistance of the modified therapeutic polypeptide.

[0025] The pharmaceutical compositions can be formulated as solids, liquids, gels or other form. When compositions are formulated for oral administration they can be formulated as a tablet or capsule, such as an enterically coated tablet or capsule is enterically coated.

[0026] Provided are methods of treatment in which any pharmaceutical composition provided herein is administered to a subject for treatment of a disease or disorder treated that is amenable to treatment by particular therapeutic polypeptide. The composition can be administered by any suitable route, including, but not limited to, parenterally, such as subcutaneously, and orally into the digestive track or formulated for mucosal administration via the mouth or nose. Where the modified therapeutic polypeptide or active fragment thereof is a modified erythropoietin (EPO), diseases and disorders amenable to treatment with EPO, include, anemias that accompany renal failure, AIDS, malignancy and chronic inflammation; perioperative surgeries; iron overload disorder; abnormal hemostasis; tissue protective therapy; neurological condition; and autologous blood donation. The anemia can be thalassemia, sickle cell anemia, the anemia of prematurity, anemia that accompanies cis-platinum chemotherapy, and anemia following intensive radiotherapy and/or chemotherapy plus bone marrow transplantation.

### BRIEF DESCRIPTION OF THE FIGURES

[0027] FIG. 1 displays two views (A and B) of the structure of erythropoietin in ribbon representation. The three N-linked glycosylation sites, N24, N38 and N83 and representative corresponding residues selected for modification for protease resistance K20Q, R139H and L80I, respectively) are in space filling representation. Additional residues selected for protease resistance are also shown in space filling representation (e.g., R4H, L153V, E159N).

[0028] FIG. 2 is a cartoon depiction of un-masked and masked is-HIT residues that are identified for protease resistance. The un-masked residues are at sites exposed for proteolysis and can be sites that are mutated to confer increased resistance to proteolysis. The masked residues are sites that are normally shielded by glycosylation, but upon de-glycosylation of the polypeptide, become exposed. The masked residues are sites that can be mutated to confer increased resistance to proteolysis, and provide protection against protease degradation under situations where the polypeptide is de-glycosylated or partially glycosylated (e.g. upon mutation of glycosylation sites, expression in hosts that are incapable of glycosylation and/or upon exposure to glucosidases upon in vivo administration). The Figure is a cartoon depiction of erythropoietin (EPO) for exemplification only, but masked and un-masked is-HIT residues can be identified in any glycosylated therapeutic polypeptide.

### DETAILED DESCRIPTION

[0029] Outline
[0030] A. Definitions
[0031] B. Erythropoietin (EPO)
[0032] C. Modified EPO polypeptides exhibiting increased protein stability
   [0033] 1. Protease resistance
      [0034] a. Serine Proteases
      [0035] b. Matrix Metalloproteinases
      [0036] c. Increased resistance to proteolysis by removal of proteolytic sites
      [0037] d. Modified EPO LEAD polypeptides exhibiting increased protease resistance
   [0038] 2. Super-LEADs
   [0039] 3. Other EPO modifications
      [0040] a. Immunogenicity
      [0041] b. Glycosylation
      [0042] c. Additional or alternative modifications
[0043] D. Compensation for Absent Glycosylation by Protease Resistant Modification(s) of Therapeutic Polypeptides
   [0044] 1. Methods of identifying masked residues
   [0045] 2. EPO polypeptides containing Protease Resistant Modifications at Masked Sites
   [0046] 3. Other therapeutic polypeptides containing Protease Resistant Modifications at Masked Sites
      [0047] a. GM-CSF
      [0048] b. M-CSF
      [0049] c. G-CSF
      [0050] d. LIF
      [0051] e. Interleukin 1β
      [0052] f. Interleukin 2
      [0053] g. Interleukin 3
      [0054] h. Interleukin 4
      [0055] i. Interleukin 5
      [0056] j. Interleukin 6
      [0057] k. Oncostatin M
      [0058] l. Stem Cell Factor
      [0059] m. Interferon β
      [0060] n. Interferon γ
   [0061] 4. Other modifications of therapeutic polypeptides
      [0062] a. Modifications to increase solubility
[0063] E. Exemplary methods for evolving or modifying EPO polypeptides and other modified therapeutic polypeptides
   [0064] 1. Non-Restricted Rational Mutagenesis One-Dimensional (1D)-Scanning
   [0065] 2. Two dimensional (2D) rational scanning (restricted rational mutagenesis)
      [0066] a. Identifying in-silico HITs
      [0067] b. Identifying replacing amino acids
      [0068] c. Construction of mutant proteins and biological assays
   [0069] 3. Three dimensional (3D) scanning
      [0070] a. Homology
      [0071] b. 3D-scanning (structural homology) methods
   [0072] 4. Super-LEADs and additive directional mutagenesis (ADM)
   [0073] 5. Multi-overlapped primer extensions
[0074] F. Assessment of EPO variants with increased resistance to proteolysis
[0075] G. Production of EPO polypeptides and other therapeutic polypeptides
   [0076] 1. Expression systems
      [0077] a. Prokaryotic expression
      [0078] b. Yeast
      [0079] c. Insects and insect cells
      [0080] d. Mammalian cells
      [0081] e. Plants
   [0082] 2. Purification
   [0083] 3. Fusion proteins
   [0084] 4. Polypeptide modification
   [0085] 5. Nucleotide sequences
[0086] H. Assessing modified EPO polypeptide properties and activities
   [0087] 1 In vitro assays
   [0088] 2. Non-human animal models
   [0089] 3. Clinical Assays
[0090] I. Formulation/Packaging/Administration
   [0091] 1. Administration of modified EPO polypeptides and other modified therapeutic polypeptides
   [0092] 2. Administration of nucleic acids encoding modified EPO polypeptides or other modified therapeutic polypeptides (gene therapy)
[0093] J. Therapeutic Uses
   [0094] 1. Anemias
   [0095] 2. Tissue protective therapies
[0096] K. Diagnostic Uses
[0097] L. Combination Therapies
[0098] M. Articles of manufacture and kits
[0099] N. Antibodies to modified EPO polypeptides and other modified therapeutic polypeptides
[0100] O. EXAMPLES

### A. DEFINITIONS

[0101] Unless defined otherwise, all technical and scientific terms used herein have the same meaning as is commonly understood by one of skill in the art to which the invention(s) belong. All patents, patent applications, published applications and publications, GenBank sequences, websites and other published materials referred to throughout the entire disclosure herein, unless noted otherwise, are incorporated by reference in their entirety. In the event that there is a plurality of definitions for terms herein, those in this section prevail. Where reference is made to a URL or other such identifier or address, it understood that such identifiers can change and particular information on the internet can come and go, but equivalent information can be found by searching the internet. Reference thereto evidences the availability and public dissemination of such information.

[0102] As used herein, a “therapeutic polypeptide” is a polypeptide that is administered to an animal, such as a human subject, for treatment of a disease or disorder. Therapeutic polypeptides are known to those of skill in the art, and typically are polypeptides that have activity in vivo, such as cytokines (e.g., erythropoietin (EPO)), and that can be exploited to treat a disease or disorder (i.e., ameliorate the symptoms of the disease or disorder). Such polypeptides can be prepared by any methods, and hence, include, but are not limited to, a recombinantly produced polypeptides, synthetically produced polypeptides, therapeutic polypeptides extracted from cells or tissues and other sources. As isolated from any sources or as produced, mature therapeutic polypeptides can be heterogeneous in length. Heterogeneity of therapeutic polypeptides can differ depending on the source of the therapeutic polypeptides. Hence reference to therapeutic polypeptides refers to the heterogeneous population as produced or isolated. When a homogeneous preparation is intended, it will be so-stated. References to therapeutic polypeptides herein are to their monomeric, dimeric or other multimeric forms, as appropriate.

[0103] Human therapeutic polypeptides include allelic variant isoforms, synthetic molecules produced from encoding nucleic acid molecules, proteins isolated from human tissue and cells, synthetic proteins, and modified forms thereof. Exemplary unmodified mature human therapeutic polypeptides include, but are not limited to, unmodified and native (i.e., wild-type) therapeutic polypeptides and the unmodified and native precursor therapeutic polypeptides that include a signal peptide and/or propeptide, and polymorphic native therapeutic polypeptides. Other exemplary human therapeutic polypeptides are those that are truncated at the N- or C-terminus.

[0104] Reference to therapeutic polypeptides also includes allelic or species variants of therapeutic polypeptides, and truncated forms or fragments thereof and forms that contain modifications in addition to those that increase protease resistance. Therapeutic polypeptides include homologous polypeptides from different species including, but not limited to animals, including humans and non-human species, such as other mammals. As with human therapeutic polypeptides, non-human therapeutic polypeptides also include heterogeneous lengths or fragments or portions of therapeutic polypeptides that are of sufficient length or include appropriate regions to retain at least one activity of full-length mature polypeptide.

[0105] Non-human therapeutic polypeptides include therapeutic polypeptides, allelic variant isoforms, synthetic molecules prepared from nucleic acids, protein isolated from non-human tissue and cells, and modified forms thereof. Therapeutic polypeptides of non-human origin include, but are not limited to, bovine, ovine, porcine, equine, murine, leporine, canine, feline, avian and other primate, such as chimpanzee and macaque, therapeutic polypeptides.

[0106] As used herein, “native therapeutic polypeptide” refers to a therapeutic polypeptide encoded by a naturally occurring gene that is present in an organism in nature, including a human or other animal. Included among native therapeutic polypeptides are the encoded precursor polypeptide, fragments thereof, and processed forms thereof, such as a mature form lacking the signal peptide as well as any pre- or post-translationally processed or modified form thereof. Also included among native therapeutic polypeptides are those that are post-translationally modified, including, but not limited to, modification by glycosylation, carboxylation, hydroxylation, hasylation, carbamylation, sulfation, and phosphorylation.

[0107] As used herein, non-glycosylated polypeptide is a polypeptide that has no glycosylation (i.e., does not contain carbohydrate moieties attached to glycosylation sites in the protein). The non-glycosylated polypeptide is produced by virtue of its expression in a host, such as prokaryotic host, that does not glycosylate the polypeptide, or by elimination of all glycosylation sites (e.g., mutation of the glycosylations sites).

[0108] As used herein, a glycosylation site refers to an amino position in a polypeptide to which a carbohydrate moiety can be attached. Typically, a glycosylated protein contains one or more amino acid residues, such as asparagine or serine, for the attachment of the carbohydrate moieties.

[0109] As used herein, a fully glycosylated polypeptide is a polypeptide that is glycosylated at all native glycosylation sites in the polypeptide.

[0110] As used herein, a deglycosylated polypeptide has reduced glycosylation compared to the native glycosylated protein because it has fewer carbohydrate moieties attached to the polypeptide, such as by virtue of fewer up to all glycosylation sites removed by mutation. Deglycosylated polypeptides also include polypeptides that have one or more carbohydrate moieties removed or partially removed by chemical or enzymatic cleavage.

[0111] As used herein, a native glycosylation site refers to an amino position, which is attached to a carbohydrate moiety, in a native polypeptide when the native polypeptide is produced in nature.

[0112] As used herein, “native polypeptide” refers to a polypeptide encoded by a naturally occurring gene that is present in an organism in nature, including a human or other animal.

[0113] As used herein, the phrase “produced under the same conditions” refers to the production of two or more polypeptides using the same production method for generating each polypeptide.

[0114] As used herein, an “erythropoietin” polypeptide (also referred to herein as EPO) refers to any erythropoietin polypeptide, including but not limited to, a recombinantly produced polypeptide, a synthetically produced polypeptide, a native EPO polypeptide, and a erythropoietin polypeptide extracted from cells as tissues including, but not limited to, kidneys, liver, urine, and blood. Alternative names that are used interchangeably for erythropoietin include epoietin. Abbreviations for erythropoietin include EPO, hEPO (human erythropoietin), and rhuEPO (recombinant human erythropoietin). Erythropoietin includes related polypeptides from different species including, but not limited to animals of human and non-human origin. Human erythropoietin (hEPO) includes erythropoietin, allelic variant isoforms, synthetic molecules from nucleic acids, protein isolated from human tissue and cells, and modified forms thereof. Exemplary unmodified mature human erythropoietin polypeptides include, but are not limited to, unmodified and wild-type native erythropoietin polypeptides (such as the polypeptide containing a sequence set forth in SEQ ID NO: 2 or 237) and the unmodified and wild-type precursor erythropoietin polypeptide that includes a signal peptide (e.g., the precursor EPO polypeptide that has the sequence set forth in SEQ ID NO: 1). One of skill in the art would recognize that the referenced positions of the mature erythropoietin polypeptide (SEQ ID NO: 2) differ by 27 amino acid residues when compared to the precursor EPO polypeptide SEQ ID NO: 1, which is the erythropoietin polypeptide containing the signal peptide sequence. Thus, the first amino acid residue of SEQ ID NO: 2 “corresponds to” the twenty-eighth (28^{th}) amino acid residue of SEQ ID NO: 1. The term “erythropoietin” also encompasses an erythropoietin polypeptide produced from a mature EPO polypeptide (SEQ ID NO: 2) by proteolytic cleavage of the C-terminal Arginine amino acid residue or a recombinant EPO polypeptide where the C-terminal arginine has been removed (e.g., as set forth in SEQ ID NOS: 236 (precursor) and 237 (mature)). The EPO polypeptides provided herein can be further modified, such as by chemical modification, or post-translational modification. Such modifications include, but are not limited to, pegylation, albumination, glycosylation, farnysylation, carboxylation, hydroxylation, hasylation, carbamylation, sulfation, phosphorylation, and other polypeptide modifications known in the art. The EPO polypeptides provided herein can be further modified by modification of the primary amino acid sequence, by deletion, addition, or substitution of one or more amino acids.

[0115] Erythropoietin includes erythropoietin from any species (as used herein, species variant), including human and non-human species. EPO polypeptides of non-human origin include, but are not limited to, murine, canine, feline, leporine, avian, bovine, ovine, porcine, equine, piscine, ranine, and other primate erythropoietin polypeptides. Exemplary EPO polypeptides of non-human origin include, for example, rhesus macaque (Macaca mulatta, e.g., SEQ ID NO: 202), mouse (Mus musculus, e.g., SEQ ID NO: 203), rat (Rattus norvegicus, e.g., SEQ ID NO: 204), pig (Sus scrofa, e.g., SEQ ID NO: 205), dog (Canis familiaris, e.g., SEQ ID NO: 206), cat (Felis catus, e.g., SEQ ID NO: 207), rabbit (Oryctolagus cuniculus, e.g., SEQ ID NO: 208), bull (Bos taurus, e.g., SEQ ID NO: 209), horse (Equus caballus, e.g., SEQ ID NO: 210), sheep (Ovis aries, e.g., SEQ ID NO: 211), chimpanzee (Pan troglodytes, e.g., SEQ ID NO: 212), zebrafish (Danio rerio, e.g., SEQ ID NO: 213), Japanese pufferfish (Takifugu rubripes, e.g., SEQ ID NO: 214), orangutan (Pongo pygmaeus, e.g., SEQ ID NO: 225), gorilla (Gorilla gorilla, e.g., SEQ ID NO: 226) among others (e.g., SEQ ID NOS: 215-224). Typically, species variants of a human EPO polypeptide have at least 40%, 50%, 60%, 70%, 80%, 90%, 91%, 92%, 93%, 94%, 95%, 96%, 97%, 98%, 99% or greater amino acid identity compared to the human EPO polypeptide.

[0116] Human and non-human EPO polypeptides include EPO polypeptides, allelic variant isoforms, tissue-specific isoforms and allelic variants thereof, synthetic variants with one more amino acid mutations, replacements, deletions, insertions, or additions, synthetic molecules prepared by translation of nucleic acids, proteins isolated from human and non-human tissue and cells, chimeric EPO polypeptides and modified forms thereof. Human and non-human EPO also include fragments or portions of EPO that are of sufficient length or include appropriate regions to retain at least one activity of the full-length mature polypeptide. In addition, as used herein, fragments or portions of modified EPO polypeptides provided also comprise one or more of the amino acid modifications set forth herein (e.g., amino acid modifications set forth in Table 3).

[0117] As used herein, “mature erythropoietin” refers to an EPO polypeptide that lacks a signal sequence. Typically, a signal sequence targets a protein for secretion via the endoplasmic reticulum (ER)-golgi pathway and is cleaved following insertion into the ER during translation. Thus, a mature EPO polypeptide is typically a secreted protein. In one example, a mature human EPO polypeptide is set forth in SEQ ID NO: 2. The amino acid sequence set forth in SEQ ID NO: 2 differs from that of the precursor polypeptide set forth in SEQ ID NO: 1 in that SEQ ID NO: 2 is lacking the signal sequence, which includes residues 1-28 of SEQ ID NO: 1.

[0118] As used herein, “native erythropoietin” refers to an EPO polypeptide encoded by a naturally occurring EPO gene that is present in an organism in nature, including a human or other animal. Included among native EPO polypeptides are the encoded precursor polypeptide, fragments thereof, and processed forms thereof, such as a mature form lacking the signal peptide as well as any pre- or post-translationally processed or modified form thereof. For example, humans express EPO. Exemplary native human EPO sequences are set forth in SEQ ID NO: 1 (precursor EPO with a signal peptide) and SEQ ID NO: 2 (mature EPO lacking a signal peptide). Also included among native EPO polypeptides are those that are post-translationally modified, including, but not limited to, modification by glycosylation, carboxylation, hydroxylation, hasylation, carbamylation, sulfation, and phosphorylation. Native EPO polypeptides also include those that have been proteolytically cleaved at R166 of SEQ ID NO: 2. Other animals produce native EPO, and include, but are not limited to, primates, mice, rats, pigs, dogs, cats, rabbits, chickens, cows, sheep, frogs, and fish. Exemplary native EPO sequences from other animals are provided in SEQ ID NOS: 202-226.

[0119] As used herein, a “protease-resistant polypeptide” is a protein that contains one or more modifications in its primary sequence of amino acids compared to a native or wild-type polypeptide and exhibits increased resistance to proteolysis compared to the native or wild-type polypeptide without the one or more amino acid modifications.

[0120] As used herein, a polypeptide modified to be protease resistant by changes in primary structure refers to a polypeptide that has been modified at one or more amino acid residues in the primary sequence of the polypeptide, which confers protease resistance. Among these are changes that do not result in changes in post-translational modification at that site.

[0121] Increased resistance to proteases can be assessed by testing for activity following exposure to particular proteases present in the gastrointestinal tract and/or serum. Typically the increase in protease resistance is at least about 1%, 2%, 3%, 4%, 5%, 6%, 7%, 8%, 9%, 10%, 20%, 30%, 40%, 50%, 60%, 70%, 80%, 90%, 91%, 92%, 93%, 94%, 95%, 96%, 97%, 98%, 99%, 100%, 200%, 300%, 400%, 500%, or more compared to the same polypeptide, absent the changes in amino acid sequence that confer the resistance. In other embodiments, the resistance to proteases of the variant polypeptides for use in oral formulations provided herein is increased by an amount of at least, 2 times, 3 times, 4 times, 5 times, 6 times, 7 times, 8 times, 9 times, 10 times, 20 times, 30 times, 40 times, 50 times, 60 times, 70 times, 80 times, 90 times, 100 times, 200 times, 300 times, 400 times, 500 times, 600 times, 700 times, 800 times, 900 times, 1000 times, or more, compared to the same polypeptide, absent the changes in amino acid sequence that confer the resistance.

[0122] As used herein, “resistance to proteolysis” refers to any amount of decreased cleavage of polypeptide by a proteolytic agent, such as a protease. This can be achieved by modifying particular amino acid residues in a polypeptide that are susceptible to cleavage by a particular protease to render the polypeptide less susceptible to cleavage compared to cleavage of the polypeptide without the modification, by the same protease under the same conditions. A modified polypeptide that exhibits increased resistance to proteolysis exhibits, for example, 1%, 2%, 3%, 4%, 5%, 6%, 7%, 8%, 9%, 10%, 20%, 30%, 40%, 50%, 60%, 70%, 80%, 90%, 91%, 92%, 93%, 94%, 95%, 96%, 97%, 98%, 99%, 100%, 200%, 300%, 400%, 500%, or more resistance to proteolysis compared to the same polypeptide, absent the amino acid modification(s).

[0123] As used herein, “proteases,” “proteinases” or “peptidases” are interchangeably used to refer to enzymes that catalyze the hydrolysis of covalent peptide bonds. Proteases include, for example, serine proteases and matrix metalloproteinases. Serine protease or serine endopeptidases constitute a class of peptidases, which are characterized by the presence of a serine residue in the active center of the enzyme. Serine proteases participate in a wide range of functions in the body, including blood clotting, inflammation as well as digestive enzymes in prokaryotes and eukaryotes. The mechanism of cleavage by “serine proteases,” is based on nucleophilic attack of a targeted peptide bond by a serine. Cysteine, threonine, or water molecules associated with aspartate or metals also can play this role. Aligned side chains of serine, histidine, and aspartate form a catalytic triad common to most serine proteases. The active site of serine proteases is shaped as a cleft where the polypeptide substrate binds. Amino acid residues are labeled from N to C termini of a polypeptide substrate (Pi, . . . , P3, P2, P1, P1′, P2′, P3′, . . . Pj). The respective binding sub-sites are labeled (Si, . . . , S3, S2, S1, S1′, S2′, S3′, . . . , Sj). The cleavage is catalyzed between P1 and P1′.

[0124] As used herein, a matrix metalloproteinases (MMP) refers to any of a family of metal-dependent, such as Zn²⁺-dependent, endopeptidases that degrade components of the extracellular matrix (ECM). MMPs include four classes: collagenases, stromelysin, membrane-type metalloproteinases, and gelatinases. Proteolytic activities of MMPs and plasminogen activators, and their inhibitors, are important for maintaining the integrity of the ECM. Cell-ECM interactions influence and mediate a wide range of processes including proliferation, differentiation, adhesion, and migration of a variety of cell types. MMPs also process a number of cell-surface cytokines, receptors and other soluble proteins and are involved in tissue remodeling processes such as wound healing, pregnancy and angiogenesis. Under physiological conditions in vivo, MMPs are synthesized as inactive precursors (zymogens) and are cleaved to produce an active form. Additionally, the enzymes are specifically regulated by endogenous inhibitors called tissue inhibitors of matrix metalloproteinases (TIMPs).

[0125] As used herein, corresponding residues refer to residues compared among or between two polypeptides that are allelic or species variants or other isoforms. One of skill in the art can readily identify residues that correspond between or among such polypeptides. For example, by aligning the sequences of EPO polypeptides, one of skill in the art can identify corresponding residues, using conserved and identical amino acid residues as guides. For example, A1 of SEQ ID NO: 2 (mature erythropoietin) corresponds to A28 of SEQ ID NO: 1 (precursor erythropoietin with a signal peptide sequence). In other instances, corresponding regions can be identified. One skilled in the art also can employ conserved amino acid residues as guides to find corresponding amino acid residues between and among human and non-human sequences. For example, residue P148 in the precursor human EPO of SEQ ID NO: 1 (residue P121 of mature human EPO of SEQ ID NO: 2) corresponds to residue P147 in the precursor mouse EPO of SEQ ID NO: 203.

[0126] As used herein, an “active portion or fragment” of an erythropoietin (EPO) polypeptide or other therapeutic polypeptide refers to a portion of the polypeptide that includes at least one modification provided herein and exhibits an activity, such as one or more activities of a full-length polypeptide or possesses another activity. For example, for an EPO polypeptide, such activities include, but are not limited to, erythropoietic or tissue protective activity. Activity can be any percentage of activity (more or less) of the full-length polypeptide, including but not limited to, 1% of the activity, 2%, 3%, 4%, 5%, 10%, 20%, 30%, 40%, 50%, 60%, 70%, 80%, 90%, 91%, 92%, 93%, 94%, 95%, 96%, 97%, 98%, 99%, 100%, 200%, 300%, 400%, 500%, or more activity compared to the full polypeptide. Such activities can be empirically determined. Assays to determine function or activity of modified forms of EPO polypeptides or other modified therapeutic polypeptides include those known to those of skill in the art, and exemplary assays are included herein. Assays for an EPO polypeptide include, for example, but are not limited to, erythrocyte proliferation assays, cell survival assays, or clinical assays to measure a therapeutic benefit.

[0127] Activity also includes activities possessed by a fragment or modified form of an EPO polypeptide or other modified therapeutic polypeptide that are not possessed by the full length polypeptide or unmodified EPO polypeptide.

[0128] As used herein, “unmodified target protein,” “unmodified protein,” “unmodified polypeptide,” “unmodified EPO,” “unmodified therapeutic polypeptide” and grammatical variations thereof refer to a starting polypeptide that is selected for modification as provided herein. The starting target polypeptide can be a naturally-occurring, wild-type form of a polypeptide. In addition, the starting target polypeptide can be altered or mutated, such that it differs from a native wild type isoform but is nonetheless referred to herein as a starting unmodified target protein relative to the subsequently modified polypeptides produced herein. Thus, existing proteins known in the art that have been modified to have a desired increase or decrease in a particular activity or property compared to an unmodified reference protein can be selected and used as the starting unmodified target protein. For example, a protein that has been modified from its native form by one or more single amino acid changes and possesses either an increase or decrease in a desired property, such as reduced immunogenicity (see e.g., U.S. Patent Publication Nos. 2004-0063917, 2005-0220800, 2006-035322, and 2006-0073563) or a change in an amino acid residue or residues to alter glycosylation, can be a target protein, referred to herein as unmodified, for further modification of either the same or a different property. Exemplary modified EPO polypeptides known in the art include any EPO polypeptide described in, for example, U.S. Pat. Nos. 4,703,008, 4,835,260, 5,457,089, 5,614,184, 5,856,298, 6,831,060, 6,555,343, 6,831,060, and 7,041,794; U.S. Patent Publication Nos. 2004-0063917, 2005-0107591, 2005-0176627, 2006-029094, and 2006-0008872; and International Patent Publication Nos. WO8603520, EP0640619, WO04003176, EP1228214, WO05103076, WO9424160 WO9012874.

[0129] Existing proteins known in the art that previously have been modified to have a desired alteration, such as an increase or decrease, in a particular biological activity or property compared to an unmodified or reference protein can be selected and used as provided herein for identification of structurally homologous loci on other structurally homologous target proteins. For example, a protein that has been modified by one or more single amino acid changes and possesses either an increase or decrease in a desired property or activity, such as for example resistance to proteolysis, can be utilized with the methods provided herein to identify on structurally homologous target proteins, corresponding structurally homologous loci that can be replaced with suitable replacing amino acids and tested for either an increase or decrease in the desired activity.

[0130] As used herein, an “activity” or a “functional activity” of an EPO polypeptide or other therapeutic polypeptide refers to any activity exhibited by the polypeptide. Such activities can be empirically determined. For an EPO polypeptide, such activities include, but are not limited to, erythropoietic or tissue protective activity. Activity can be assessed in vitro or in vivo using recognized assays. For example, for an EPO polypeptide, activities can be assessed by measuring erythrocyte proliferation in vitro or in vivo. The results of such assays that indicate that a polypeptide exhibits an activity can be correlated to activity of the polypeptide in vivo, in which in vivo activity can be referred to as therapeutic activity, or biological activity. Activity of a modified polypeptide can be any level of percentage of activity of the unmodified polypeptide, including but not limited to, 1% of the activity, 2%, 3%, 4%, 5%, 10%, 20%, 30%, 40%, 50%, 60%, 70%, 80%, 90%, 91%, 92%, 93%, 94%, 95%, 96%, 97%, 98%, 99%, 100%, 200%, 300%, 400%, 500%, or more of activity compared to the unmodified polypeptide. Assays to determine functionality or activity of modified forms of EPO are known to those of skill in the art. Exemplary assays to assess the activity of an EPO polypeptide include erythropoietic assays that measure erythrocyte cell proliferation and are described in the Examples.

[0131] As used herein. “therapeutic activity” refers to the in vivo activity of a therapeutic polypeptide. Generally, the therapeutic activity is the activity that is used to treat a disease or condition. Therapeutic activity of a modified polypeptide can be any level of percentage of therapeutic activity of the unmodified polypeptide, including but not limited to, 1% of the activity, 2%, 3%, 4%, 5%, 10%, 20%, 30%, 40%, 50%, 60%, 70%, 80%, 90%, 91%, 92%, 93%, 94%, 95%, 96%, 97%, 98%, 99%, 100%, 200%, 300%, 400%, 500%, or more of therapeutic activity compared to the unmodified polypeptide.

[0132] As used herein, the recitation the glycosylation is required for therapeutic activity” or “important for therapeutic activity” means that the glycosylated form of the polypeptide has greater therapeutic activity (activity in vivo when administered) than a deglycosylated or non-glycosylated form of the therapeutic polypeptide (i.e., form of the polypeptide that is not glycosylated, such as a polypeptide expressed in a bacterial host). For example, glycosylation is required for therapeutic activity if therapeutic activity of the glycosylated polypeptide is greater than the non-glycosylated form, particularly such that the non-glycosylated form cannot be used therapeutically. Such difference in activity depends upon the protein, but those of skill in the art can recognize whether a particular protein is suitable for therapeutic use. Exemplary of such proteins is erythropoietin (EPO), which is a glycosylated protein, and is administered therapeutically as a glycosylated protein. The difference in activity between a form of a therapeutic protein that is glycosylated and one that is not glycosylated, is as noted, dependent upon the protein, but can be 15%, 25%, 30%, 50%, 100% greater, including at least or about 1 time, at least or about 2 times, 3 times, 4 times, 5 times, 6 times, 7 times, 8 times, 9 times, 10 times, 20 times, 30 times, 40 times, 50 times, 60 times, 70 times, 80 times, 90 times, 100 times, 200 times, 300 times, 400 times, 500 times, 600 times, 700 times, 800 times, 900 times, 1000 times, or more times greater than the therapeutic activity of the deglycosylated or non-glycosylated form of the therapeutic polypeptide.

[0133] As used herein, “exhibits at least one activity” or “retains at least one activity” refers to the activity exhibited by a modified polypeptide, such as a modified, EPO polypeptide or other therapeutic polypeptide, compared to the polypeptide that does not contain the modification. A modified polypeptide that retains an activity of an unmodified polypeptide can exhibit improved activity or maintains the activity (e.g., erythropoietic or tissue protective activity for an EPO polypeptide) of the unmodified polypeptide. In some instances, a modified polypeptide can retain an activity that is increased compared to an unmodified polypeptide. In some cases, a modified polypeptide can retain an activity that is decreased compared to an unmodified polypeptide. Activity of a modified polypeptide can be any level of percentage of activity of the unmodified polypeptide, including but not limited to, 1% of the activity, 2%, 3%, 4%, 5%, 10%, 20%, 30%, 40%, 50%, 60%, 70%, 80%, 90%, 91%, 92%, 93%, 94%, 95%, 96%, 97%, 98%, 99%, 100%, 200%, 300%, 400%, 500%, or more activity compared to the unmodified polypeptide. For example, a modified EPO polypeptide retains at least about or 1%, 2%, 3%, 4%, 5%, 6%, 7%, 8%, 9%, 10%, 20%, 30%, 40%, 50%, 60%, 70%, 80%, 90%, 91%, 92%, 93%, 94%, 95%, 96%, 97%, 98%, or at least 99% of the activity of the unmodified polypeptide. In other embodiments, the change in activity is at least about 2 times, 3 times, 4 times, 5 times, 6 times, 7 times, 8 times, 9 times, 10 times, 20 times, 30 times, 40 times, 50 times, 60 times, 70 times, 80 times, 90 times, 100 times, 200 times, 300 times, 400 times, 500 times, 600 times, 700 times, 800 times, 900 times, 1000 times, or more times greater than unmodified polypeptide. Assays for retention of an activity depend on the activity to be retained. Such assays can be performed in vitro or in vivo. Activity can be measured, for example, using assays known in the art and described in the Examples below for activities such as but not limited to cell proliferative and cell survival activity. Activities of a modified polypeptide compared to an unmodified polypeptide also can be assessed in terms of an in vivo therapeutic or biological activity or result following administration of the polypeptide. For example, for an EPO polypypeptide, such activities include, but are not limited to, changes in the hematocrit levels, reticulocyte count, erythrocyte mass, plasma iron turnover rates, marrow transit time, or hemoglobin concentration (i.e., stimulation of hemoglobin C synthesis), or stimulation of reticulocyte response.

[0134] As used herein, a “property” of an erythropoietin polypeptide or other therapeutic polypeptide refers to any property exhibited by an erythropoietin polypeptide or therapeutic polypeptide. Such properties include, but are not limited to, protein stability, resistance to proteolysis, conformational stability, thermal tolerance, and tolerance to pH conditions. Changes in properties can alter an “activity” of the polypeptide. For example, a change in the protease resistance of the therapeutic polypeptide can alter the in vivo therapeutic polypeptide.

[0135] As used herein, “protein stability” refers to increased protein-half-life under one or more conditions including, but not limited to, exposure to proteases, increased temperature, particular pH conditions and/or exposure to denaturing ingredients. Increased protein stability exhibited by a polypeptide can be manifested as increased protease resistance, or increased conformational stability such as increased tolerance to temperature, pH, or tolerance to other denaturing ingredients. A modified polypeptide that exhibits increased protein stability in vitro or in vivo is, for example, 1%, 2%, 3%, 4%, 5%, 6%, 7%, 8%, 9%, 10%, 20%, 30%, 40%, 50%, 60%, 70%, 80%, 90%, 91%, 92%, 93%, 94%, 95%, 96%, 97%, 98%, 99%, 100%, 200%, 300%, 400%, 500%, or more stable than an unmodified polypeptide. The protein stability of a polypeptide, for example, can be assessed in assays of protease resistance or conformational stability (e.g., resistance to temperature changes) to determine if an activity of the polypeptide is altered, such as is described in the Examples below. For example, the resistance of the modified polypeptides compared to wild-type polypeptides against enzymatic cleavage by proteases (e.g., α-chymotrypsin, carboxypeptidase, endoproteinase Arg-C, endoproteinase Asp-N, endoproteinase Glu-C, endoproteinase Lys-C, and trypsin) can be empirically tested by treating the polypeptides with proteases over time and then testing the polypeptides for residual functional activity such as for example, erythropoietic or tissue protective activities.

[0136] As used herein, “serum stability” refers to protein stability in serum.

[0137] As used herein, “resistance to proteolysis” refers to any amount of decreased cleavage of polypeptide by a proteolytic agent, such as a protease. This can be achieved by modifying particular amino acid residues that are susceptible to cleavage by a particular protease to render them less susceptible to cleavage compared to cleavage by the same protease under the same conditions. A modified polypeptide that exhibits increased resistance to proteolysis exhibits, for example, 1%, 2%, 3%, 4%, 5%, 6%, 7%, 8%, 9%, 10%, 20%, 30%, 40%, 50%, 60%, 70%, 80%, 90%, 91%, 92%, 93%, 94%, 95%, 96%, 97%, 98%, 99%, 100%, 200%, 300%, 400%, 500%, or more resistance to proteolysis than an unmodified polypeptide.

[0138] As used herein, a “protease sensitive sites” are amino acid positions in a polypeptide that are susceptible to cleavage by a particular protease. Protease sensitive site is used herein interchangeably with protease recognition site or protease cleavage site.

[0139] As used herein, “conformational stability” refers to any amount of increased tolerance of a polypeptide to denaturation. This can be achieved by modifying particular amino acid residues that are susceptible to denaturation conditions to render them less susceptible to denaturation under the same conditions. Conformational stability can be determined by assessing the resistance or susceptibility of a polypeptide to denaturation conditions, such as resistance to temperature or pH. A modified polypeptide that exhibits increased conformational stability exhibits, for example, 1%, 2%, 3%, 4%, 5%, 6%, 7%, 8%, 9%, 10%, 20%, 30%, 40%, 50%, 60%, 70%, 80%, 90%, 91%, 92%, 93%, 94%, 95%, 96%, 97%, 98%, 99%, 100%, 200%, 300%, 400%, 500%, or more resistance to denaturation than an unmodified polypeptide.

[0140] As used herein, “denaturation” refers to any noncovalent change in the structure of a protein. This change can alter the secondary, tertiary and/or quaternary structure of the polypeptide molecule. Denaturation of a polypeptide can occur by, for example but not limited to, exposure to chaotropic agents such as urea and guanidine hydrochloride, detergents, temperature, pH, and reagents which cleave disulfide bridges such as dithiothreitol or dithiothreitol.

[0141] As used herein, “thermal tolerance” refers to any temperature affected or dependent change the stability of a protein. For example, a change, such as an increased thermal tolerance, can be reflected in a decreased amount of denaturation of a polypeptide after exposure to altered (particularly increased) temperatures or compared to the unmodified protein under the same conditions. A modified polypeptide that exhibits increased thermal tolerance exhibits, for example, 1%, 2%, 3%, 4%, 5%, 6%, 7%, 8%, 9%, 10%, 20%, 30%, 40%, 50%, 60%, 70%, 80%, 90%, 91%, 92%, 93%, 94%, 95%, 96%, 97%, 98%, 99%, 100%, 200%, 300%, 400%, 500%, or more stability at varied temperatures compared to the unmodified polypeptide. For example, a modified polypeptide can exhibit increased thermal tolerance in vivo when administered to a subject compared to an unmodified polypeptide, and thereby exhibit increased serum half-life.

[0142] As used herein, “EC₅₀” refers to the effective concentration of a therapeutic polypeptide necessary to give one-half of a maximum response. For purposes herein, the response measured is any activity of an EPO polypeptide, such as but not limited to, activity in an erythropoietic or tissue protection assay.

[0143] As used herein, “half-life” refers to the time required for a measured parameter, such the potency, activity and effective concentration of a polypeptide, molecule to fall to half of its original level, such as half of its original potency, activity, or effective concentration at time zero. Thus, the parameter, such as potency, activity, or effective concentration of a polypeptide molecule is generally measured over time. For purposes herein, half-life can be measured in vitro or in vivo. For example, the half-life of a therapeutic polypeptide or a modified therapeutic polypeptide can be measured in vitro by assessing its activity (e.g., erythropoietic or tissue protective activity) following incubation over increasing time under certain conditions, such as for example, after exposure to proteases, or denaturing conditions such as temperature or pH. In another example, the half-life of a therapeutic polypeptide or a modified therapeutic polypeptide can be measured in vivo following administration (e.g., intravenous, subcutaneous, intraduodenal, oral) of the polypeptide to a human or other animal, followed by sampling of the blood over time to determine the remaining effective concentration and/or activity of the polypeptide in the blood sample.

[0144] As used herein, “therapeutic polypeptide-mediated disease or disorder” refers to any disease or disorder in which treatment with the therapeutic polypeptide (or modified therapeutic polypeptide) ameliorates any symptom or manifestation of the disease or disorder.

[0145] As used herein, “erythropoietin- or EPO-mediated disease or disorder” refers to any disease or disorder in which treatment with an erythropoietin (or modified erythropoietin) ameliorates any symptom or manifestation of the disease or disorder. Exemplary erythropoietin-mediated diseases and disorders include, but are not limited to, anemias, such as anemias of chronic inflammation, renal failure, AIDS, and malignancy or diseases or conditions which utilize the tissue protective activities of an EPO polypeptide for protection against an injury or restoration of function following the injury to responsive mammalian cells, tissues, or organs.

[0146] As used herein, “treating” a subject with a disease or condition means that the subject's symptoms are partially or totally alleviated, or remain static following treatment. Hence treatment encompasses prophylaxis, therapy and/or cure. Prophylaxis refers to prevention of a potential disease or condition and/or a prevention of worsening of symptoms or progression of a disease or condition. Prevention of a disease or condition encompasses alleviation or elimination of one or more risk factors for development of the disease or condition. Treatment also encompasses any pharmaceutical use of a modified therapeutic polypeptide and oral compositions provided herein.

[0147] As used herein, treatment encompasses prophylaxis, therapy, and/or cure. For example, treatment encompasses any pharmaceutical use of a modified erythropoietin or other therapeutic polypeptide provided and compositions thereof provided herein.

[0148] As used herein, prophylaxis refers to prevention of a potential disease and/or a prevention of worsening of symptoms or progression of a disease.

[0149] As used herein, prevention refers to absolute prevention of a particular disease or disorder. Since it generally is not possible to ascertain whether a disease or disorder never developed, prevention also includes reduction in the risk of developing or having a disease or disorder.

[0150] As used herein, a composition that does not include exogenously added proteases is a composition formulated without the addition of proteases. Any additional proteases present in the composition would originate from the method of formulation.

[0151] As used herein, “therapeutically effective amount administered” or “therapeutically effective dose,” refers to an amount of an agent, compound, material, in a dosage formulation that is at least sufficient to produce a therapeutic effect in a subject. Typically, the amount is high enough to reach a therapeutically effective amount in the blood. The therapeutically effective amount in the blood to be achieved is known for many of the therapeutic polypeptides employed in the methods and dosage formulations effective dosages have been established for the unmodified proteins. For the modified proteins the dosages can be selected to achieve the same effect. The therapeutically effective amount of a protease-resistant polypeptide for use for treatment will vary with the particular condition being treated, the age and physical condition of the patient being treated, the severity of the condition, the duration of the treatment, the nature of concurrent therapy, the particular protease-resistant polypeptide being employed, the particular pharmaceutically-acceptable excipients and/or factors within the knowledge and expertise of the attending physician.

[0152] As used herein term “pharmaceutically-acceptable excipients” includes any physiologically inert, pharmacologically inactive material known to one skilled in the art, which is compatible with the physical and chemical characteristics of the particular protease-resistant polypeptide selected for use. Pharmaceutically-acceptable excipients include, but are not limited to, polymers, resins, plasticizers, fillers, lubricants, solvents, co-solvents, buffer systems, surfactants, preservatives, sweetening agents, flavoring agents, pharmaceutical grade dyes or pigments, and viscosity agents. All or part of the pharmaceutically-acceptable excipients contained in the pharmaceutically compositions described herein can be part of the enteric coating.

[0153] As used herein, “oral administration” or “oral delivery” of a therapeutic polypeptide refers to administration of a therapeutic polypeptide to the gastrointestinal tract by ingestion. Typically the compositions for oral administration provided herein differ from mucosal delivery in that the therapeutic polypeptide is deliverered to the lower intestinal tract for absorption into the bloodstream.

[0154] As used herein, the term “lower gastrointestinal tract” means the small intestine and the large intestine.

[0155] As used herein, “mucosal administration” or “mucosal delivery” of a therapeutic polypeptide refers to administration of a therapeutic polypeptide to a mucosal surface, including nasal, pulmonary, vaginal, rectal, urethral, and sublingual or buccal delivery.

[0156] As used herein, “oromucosal” refers to refers to the mucosa lining the oral and/or nasopharyngeal cavities.

[0157] As used herein, the term “enteric-coating” relates to a mixture of pharmaceutically-acceptable excipients which is applied to, combined with, mixed with or otherwise added to the protease-resistant polypeptide. The enteric coating effects release of the protease-resistant polypeptide in the lower intestinal tract and prevents early digestion or degradation of the tablet, capsule or other oral dosage form. The coating can be applied to a compressed tablet, a gelatin capsule, and/or the beads, granules, particles, or a lyophilized powder of the protease-resistant polypeptide, which are encapsulated into starch or gelatin capsules or compressed into tablets.

[0158] Accordingly, an enteric coating can be applied to a compressed tablet which contains granules, particles, or a lyophilized powder of the protease-resistant-polypeptide; however, in the event the granules or particles are themselves enterically-coated before being compressed into a tablet, then the enteric coating of the compressed tablet itself is optional. The enteric coating also can applied to the beads or small particles of the therapeutic polypeptide, which can be encapsulated into a starch or gelatin capsule. The capsule can then be coated with an enteric coating, if desired. Because of their enteric coating, these oral formulations will prohibit the undesirable delivery of the protease-resistant polypeptide to the mucosal and epithelial tissues of the upper gastrointestinal tract, especially the mouth, pharynx and esophagus. The coating also achieves the delivery of the active to the lower gastrointestinal tract at a point which can be manipulated by one skilled in the art by choosing the excipients which make up the coating, its type, and/or its thickness.

[0159] As used herein, the term “delayed-release” refers to a delivery of a protease-resistant polypeptide, which is effected by formulating the protease-resistant polypeptide in a pharmaceutical composition so that the release will be accomplished at some generally predictable location in the lower intestinal tract more distal to that which would have been accomplished if there had been no alteration in the delivery of the therapeutic polypeptide. An exemplary method for effecting the delayed-release of the active ingredient involves coating (or otherwise encapsulating) the active ingredient with a substance which is not absorbed, or otherwise broken down, by the gastrointestinal fluids to release the active ingredient until a specific desired point in the intestinal tract is reached. An exemplary type of delayed-release formulation for use herein is achieved by coating the tablet, capsule, or particles, granules, or beads of active ingredient with a substance which is pH-dependent, i.e., broken down at a pH which is generally present in the small intestine, but not broken down at a pH which is generally present in the mouth, pharynx, esophagus or stomach. However, if it is desired to effect the topical delivery via the oral administration of a pharmaceutical composition containing the protease-resistant polypeptide to only the large intestine, or to the entire length of the intestinal tract beginning with the small intestine, then the selection of the coating material and/or the method of coating or otherwise combining the protease-resistant polypeptide with the selected coating material or other pharmaceutically-acceptable excipients can be varied or altered as is described herein or by any method known to one skilled in the art.

[0160] As used herein, a “therapeutic effect” or “therapeutic benefit” refers to a positive outcome of treating a symptom and can include, for example, a beneficial change in a clinical index such as, for example, in the case of treatment with an EPO polypeptide, red blood cell count (RBC), platelet count, hematocrit (HCT), hemoglobin level (hemoglobin C), as well as subjective indices such as reduced pain, reduced fatigue, improved vigor or betterment in sense of well being.

[0161] As used herein, “responsive cell” refers to a mammalian cell whose function or viability can be maintained, promoted, enhanced, regenerated, or in any other way benefited, by exposure to a modified therapeutic polypeptide.

[0162] As used herein, “subject” to be treated includes humans and human or non-human animals. Mammals include, primates, such as humans, chimpanzees, gorillas and monkeys; a domesticated animals, such as dogs, horses, cats, pigs, goats, cows, and rodents, such as mice, rats, hamsters and gerbils.

[0163] As used herein, “patient” or “subject” to be treated includes humans or non-human animals. Mammals include primates, such as humans, chimpanzees, a gorillas and monkeys; domesticated animals, such as dogs, horses, cats, pigs, goats, cows; and rodents such as mice, rats, hamsters and gerbils.

[0164] As used herein, “a directed evolution method” refers to methods that “adapt” either proteins, including natural proteins, synthetic proteins or protein domains to have changed proportions, such as the ability to act in different or existing natural or artificial chemical or biological environments and/or to elicit new functions and/or to increase or decrease a given activity, and/or to modulate a given feature. Exemplary directed evolution methods include, among others, rational directed evolution methods described in U.S. Published Application Nos. US 2003-0134351 A1 and US-2004-0132977 A1.

[0165] As used herein, “two dimensional rational mutagenesis scanning (2-D scanning)” refers to the processes provided herein in which two dimensions of a particular protein sequence are scanned: (1) one dimension is to identify specific amino acid residues along the protein sequence to replace with different amino acids, referred to as is-HIT target positions, and (2) the second dimension is the amino acid type selected for replacing the particular is-HIT target, referred to as the replacing amino acid.

[0166] As used herein, “in silico” refers to research and experiments performed using a computer. In silico methods include, but are not limited to, molecular modeling studies and biomolecular docking experiments.

[0167] As used herein, “is-HIT” refers to an in silico identified amino acid position along a target protein sequence that has been identified based on i) the particular protein properties to be evolved, ii) the protein's sequence of amino acids, and/or iii) the known properties of the individual amino acids. These is-HIT loci on the protein sequence are identified without use of experimental biological methods. For example, once the protein feature(s) to be optimized is (are) selected, diverse sources of information or previous knowledge (i.e., protein primary, secondary or tertiary structures, literature, patents) are exploited to determine those amino acid positions that are amenable to improved protein fitness by replacement with a different amino acid. This step uses protein analysis “in silico.” All possible candidate amino acid positions along a target protein's primary sequence that might be involved in the feature being evolved are referred to herein as “in silico HITs” (“is-HITs”). The collection (library), of all is-HITs identified during this step represents the first dimension (target residue position) of the two-dimensional scanning methods provided herein.

[0168] As used herein, “masked is-Hit” refers to is-HIT positions identified based on a particular property or activity (e.g., protease resistance) that are, based on the three dimensional structure of the therapeutic polypeptide, located within 0-25 \acute{Å} from a glycosylation site. Generally, masked is-HIT residues are at or about 1, 2, 3, 4, 5, 6, 7, 8, 9, 10, 11, 12, 13, 14, 15, 16, 17, 18, 19, 20, 21, 22, 23, 24 or 25 \acute{Å} from at least one glycosylation site, sometimes two or more glycosylation sites.

[0169] As used herein, “un-masked is-Hit” refers to is-HIT positions identified based on a particular property or activity (e.g., protease resistance) that are not, based on the three dimensional structure of the therapeutic polypeptide, located within 0-25 \acute{Å} from a glycosylation site. Hence, un-masked is-HIT residues are not shielded by glycosylation and can be those that are exposed on the surface of the polypeptide even when the polypeptide is glycosylated.

[0170] As used herein, “amenable to providing the evolved predetermined property or activity” in the context of identifying is-HITs refers to an amino acid position on a protein that is contemplated, based on in silico analysis, to possess properties or features that when replaced result in the desired activity being evolved. The phrase “amenable to providing the evolved predetermined property or activity” in the context of identifying replacement amino acids refers to a particular amino acid type that is contemplated, based on in silico analysis, to possess properties or features that when used to replace the original amino acid in the unmodified starting protein result in the evolution of a desired or preselected activity.

[0171] As used herein, “high-throughput screening” (HTS) refers to processes that test a large number of samples, such as samples of test proteins or cells containing nucleic acids encoding the proteins of interest to identify structures of interest or to identify test compounds that interact with the variant proteins or cells containing them. HTS operations are amenable to automation and are typically computerized to handle sample preparation, assay procedures, and the subsequent processing of large volumes of data.

[0172] As used herein, the term “restricted,” in the context of the identification of is-HIT amino acid positions along the amino acid residues in a protein selected for amino acid replacement and/or the identification of replacing amino acids, means that fewer than all amino acids on the protein-backbone are selected for amino acid replacement and/or fewer than all of the remaining 19 amino acids available to replace the original amino acid present in the unmodified starting protein are selected for replacement. In particular embodiments of the methods provided herein, the is-HIT amino acid positions are restricted such that fewer than all amino acids on the protein-backbone are selected for amino acid replacement. In other embodiments, the replacing amino acids are restricted such that fewer than all of the remaining 19 amino acids available to replace the native amino acid present in the unmodified starting protein are selected as replacing amino acids. In an exemplary embodiment, both of the scans to identify is-HIT amino acid positions and the replacing amino acids are restricted such that fewer than all amino acids on the protein-backbone are selected for amino acid replacement and fewer than all of the remaining 19 amino acids available to replace the native amino acid are selected for replacement.

[0173] As used herein, “candidate LEADs” are mutant proteins that are designed to have an alteration in property, activity or other attribute, typically a predetermined or preselected property, activity or other attribute, such as a, chemical, physical or biological property or activity in which such alteration is sought. The alteration can add, alter, remove or otherwise change a property, activity or other attribute of a polypeptide. In the methods herein, candidate LEADs are generally generated by systematically replacing is-HITS loci in a protein or a domain thereof with typically a restricted subset, or all, of the remaining 19 amino acids, such as obtained using PAM analysis. Candidate LEADs can be generated by other methods known to those of skill in the art tested by the high throughput methods herein.

[0174] As used herein, “LEADs” are “candidate LEADs” whose property, activity or other attribute has been changed, optimized, improved, added or eliminated. For purposes herein a “LEAD” typically has activity with respect to a property or activity of interest in an unmodified polypeptide that exhibits such activity or property that differs by at least about or 1%, 2%, 3%, 4%, 5%, 6%, 7%, 8%, 9%, 10%, 20%, 30%, 40%, 50%, 60%, 70%, 80%, 90%, 91%, 92%, 93%, 94%, 95%, 96%, 97%, 98%, 99%, 100%, 200%, 300%, 400%, 500%, or more from the unmodified and/or wild type (native) protein. In certain embodiments, the change in activity is at least about 2 times, 3 times, 4 times, 5 times, 6 times, 7 times, 8 times, 9 times, 10 times, 20 times, 30 times, 40 times, 50 times, 60 times, 70 times, 80 times, 90 times, 100 times, 200 times, 300 times, 400 times, 500 times, 600 times, 700 times, 800 times, 900 times, 1000 times, or more times greater than the activity of the unmodified and/or wild type (native) protein. The desired alteration, which can be either an increase or a reduction in activity, depends upon the function or property of interest (e.g., at least about or 10%, at least about or 20%, etc.). The LEADs can be further optimized by replacement of a plurality (2 or more) of “is-HIT” target positions on the same protein molecule to generate “super-LEADs.”

[0175] As used herein, the term “super-LEAD” refers to protein mutants (variants) obtained by adding the single mutations present in two or more of the LEAD molecules in a single protein molecule. Accordingly, in the context of the modified proteins provided herein, the phrase “proteins comprising one or more single amino acid replacements” encompasses addition of two or more of the mutations described herein for one respective protein. For example, the modified proteins provided herein containing one or more single amino acid replacements can have any of 2, 3, 4, 5, 6, 7, 8, 9, 10, 11, 12, 13, 14, 15, 16, 17, 18, 19, 20 or more of the amino acid replacements at the disclosed replacement positions. The collection of super-LEAD mutant molecules is generated, tested, and phenotypically characterized one-by-one in addressable arrays. Super-LEAD mutant molecules are molecules containing a variable number and type of LEAD mutation. Those molecules displaying further improved fitness for the particular feature being evolved, are referred to as super-LEADs. Super-LEADs can be generated by other methods known to those of skill in the art and tested by the high throughput methods herein. For purposes herein, a super-LEAD typically has activity with respect to the function of interest that differs from the altered activity (or the new activity or eliminated activity) of a LEAD by a desired amount, such as at least about or 1%, 2%, 3%, 4%, 5%, 6%, 7%, 8%, 9%, 10%, 20%, 30%, 40%, 50%, 60%, 70%, 80%, 90%, 91%, 92%, 93%, 94%, 95%, 96%, 97%, 98%, 99%, 100%, 200%, 300%, 400%, 500%, or more from the LEAD mutant from which it is derived. As with LEADs, the change in the activity for super-LEADs is dependent upon the activity that is being “evolved.” The desired alteration, which can be either an increase or a reduction in activity, depends upon the function or property of interest. The desired alteration also can be an addition or elimination of a property or activity.

[0176] As used herein, the phrase “altered loci” refers to the is-HIT amino acid positions in the LEADs or super-LEADs that are replaced with different replacing amino acids resulting in the desired altered phenotype or activity.

[0177] As used herein, an “exposed residue” presents more than 15% of its surface exposed to the solvent.

[0178] As used herein, the phrase “structural homology” refers to the degree of coincidence in space between two or more protein backbones. Protein backbones that adopt the same protein structure, fold and show similarity upon three-dimensional structural superposition in space can be considered structurally homologous. Structural homology is not based on sequence homology, but rather on three-dimensional homology. Two amino acids in two different proteins said to be homologous based on structural homology between those proteins do not necessarily need to be in sequence-based homologous regions. For example, protein backbones that have a root mean squared (RMS) deviation of less than 3.5, 3.0, 2.5, 2.0, 1.7 or 1.5 angstroms at a given space position or defined region between each other can be considered to be structurally homologous in that region and are referred to herein as having a “high coincidence” between their backbones. It is contemplated herein that substantially equivalent (e.g., “structurally related”) amino acid positions that are located on two or more different protein sequences that share a certain degree of structural homology have comparable functional tasks; also referred to herein as “structurally homologous loci.” These two amino acids then can be said to be “structurally similar” or “structurally related” with each other, even if their precise primary linear positions on the sequences of amino acids, when these sequences are aligned, do not match with each other. Amino acids that are “structurally related” can be far away from each other in the primary protein sequences, when these sequences are aligned following the rules of classical sequence homology.

[0179] As used herein, a “structural homolog” is a protein that is recognized by structural homology. Exemplary EPO structural homologs include many other cytokines, including, for example, granulocyte-macrophage colony stimulating factor (GM-CSF), interleukin-2 (IL-2), interleukin-3 (IL-3), interleukin-4 (IL-4), interleukin-5 (IL-5), interleukin-13 (IL-13), Flt3 ligand and stem cell factor (SCF).

[0180] As used herein, “corresponding to structurally-related” positions on two or more polypeptides, such as two EPO polypeptides or other polypeptides that are EPO structural homologs, refers to those amino acid positions determined based upon structural homology to maximize tri-dimensional overlapping between or among polypeptides.

[0181] As used herein, “variant,” “therapeutic polypeptide variant,” “modified therapeutic polypeptide” and “modified therapeutic protein” refer to a therapeutic polypeptide that has one or more mutations compared to an unmodified therapeutic polypeptide. An “erythropoietin variant,” “modified erythropoietin polypeptides” and “modified erythropoietin proteins” refers to an EPO polypeptide that has one or more mutations compared to an unmodified erythropoietin polypeptide. The one or more mutations can be one or amino acid replacements, insertions or deletions and any combination thereof. Typically, a modified polypeptide has one or more modifications in primary sequence compared to the unmodified polypeptide. For example, a modified polypeptide provided herein can have 1, 2, 3, 4, 5, 6, 7, 8, 9, 10, 11, 12, 13, 14, 15, 16, 17, 18, 19, 20, or more mutations compared to an unmodified polypeptide. Any length polypeptide is contemplated as long as the resulting polypeptide exhibits at least one activity associated with a native polypeptide.

[0182] As used herein, a “single amino acid replacement” refers to the replacement of one amino acid by another amino acid. The replacement can be by a natural amino acid or non-natural amino acids. When one amino acid is replaced by another amino acid in a protein, the total number of amino acids in the protein is unchanged.

[0183] As used herein, the phrase “only one amino acid replacement occurs on each target protein” refers to the modification of a target protein, such that it differs from the unmodified form of the target protein by a single amino acid change. For example, in one embodiment, mutagenesis is performed by the replacement of a single amino acid residue at only one is-HIT target position on the protein backbone (e.g., “one-by-one” in addressable arrays), such that each individual mutant generated is the single product of each single mutagenesis reaction. The single amino acid replacement mutagenesis reactions are repeated for each of the replacing amino acids selected at each of the is-HIT target positions. Thus, a plurality of mutant protein molecules are produced, whereby each mutant protein contains a single amino acid replacement at only one of the is-HIT target positions.

[0184] As used herein, the phrase “pseudo-wild type,” in the context of single or multiple amino acid replacements, are those amino acids that, while different from the original (e.g., such as native) amino acid at a given amino acid position, can replace the native one at that position without introducing any measurable change in a particular protein activity.

[0185] A population (library) of sets of nucleic acid molecules encoding a collection of mutant molecules is generated and phenotypically characterized such that proteins with sequences of amino acids different from the original amino acid, but that still elicit substantially the same level (i.e., at least about or 10%, 50%, 80%, 90%, 91%, 92%, 93%, 94%, 95%, 96%, 97%, 98%, 99%, or 100%, depending upon the protein) and type of desired activity as the original protein are selected. A collection (or library), contains two, three, four, five, 10, 50, 100, 500, 1000, 10³, 10⁴ or more modified therapeutic polypeptides.

[0186] As used herein, “in a position or positions corresponding to an amino acid position” of a protein, refers to amino acid positions that are determined to correspond to one another based on sequence and/or structural alignments with a specified reference protein. For example, in a position corresponding to an amino acid position of human EPO set forth as SEQ ID NO: 2 can be determined empirically by aligning the sequence of amino acids set forth in SEQ ID NO: 2 with a particular EPO polypeptide of interest. Corresponding positions can be determined by such alignment by one of skill in the art using manual alignments or by using the numerous alignment programs available (for example, BLASTP). Corresponding positions also can be based on structural alignments, for example by using computer simulated alignments of protein structure. Recitation that amino acids of a polypeptide correspond to amino acids in a disclosed sequence refers to amino acids identified upon alignment of the polypeptide with the disclosed sequence to maximize identity or homology (where conserved amino acids are aligned) using a standard alignment algorithm, such as the GAP algorithm.

[0187] As used herein, “at a position corresponding to” refers to a position of interest (i.e., base number or residue number) in a nucleic acid molecule or protein relative to the position in another reference nucleic acid molecule or protein. The position of interest to the position in another reference protein can be in, for example, a precursor protein, an allelic variant, a heterologous protein, an amino acid sequence from the same protein of another species (i.e., species variant), etc. Corresponding positions can be determined by comparing and aligning sequences to maximize the number of matching nucleotides or residues, for example, such that identity between the sequences is greater than 95%, preferably greater than 96%, more preferably greater than 97%, even more preferably greater than 98% and most preferably greater than 99%. The position of interest is then given the number assigned in the reference nucleic acid molecule.

[0188] As used herein, the terms “homology” and “identity” are used interchangeably, but homology for proteins can include conservative amino acid changes. In general to identify corresponding positions the sequences of amino acids are aligned so that the highest order match is obtained (see, e.g.: Computational Molecular Biology, Lesk, A. M., ed., Oxford University Press, New York, 1988; Biocomputing: Informatics and Genome Projects, Smith, D. W., ed., Academic Press, New York, 1993; Computer Analysis of Sequence Data, Part I, Griffin, A. M., and Griffin, H. G., eds., Humana Press, New Jersey, 1994; Sequence Analysis in Molecular Biology, von Heinje, G., Academic Press, 1987; and Sequence Analysis Primer, Gribskov, M. and Devereux, J., eds., M Stockton Press, New York, 1991; Carillo et al. (1988) SIAM J Applied Math 48:1073).

[0189] As use herein, “sequence identity” refers to the number of identical amino acids (or nucleotide bases) in a comparison between a test and a reference polypeptide or polynucleotide. Homologous polypeptides refer to a pre-determined number of identical or homologous amino acid residues. Homology includes conservative amino acid substitutions as well identical residues. Sequence identity can be determined by standard alignment algorithm programs used with default gap penalties established by each supplier. Homologous nucleic acid molecules refer to a pre-determined number of identical or homologous nucleotides. Homology includes substitutions that do not change the encoded amino acid (i.e., “silent substitutions”) as well identical residues. Substantially homologous nucleic acid molecules hybridize typically at moderate stringency or at high stringency all along the length of the nucleic acid or along at least about 70%, 80%, 85%, 90%, 91%, 92%, 93%, 94%, 95%, 96%, 97%, 98%, or 99% of the full-length nucleic acid molecule of interest. Also contemplated are nucleic acid molecules that contain degenerate codons in place of codons in the hybridizing nucleic acid molecule. (For determination of homology of proteins, conservative amino acids can be aligned as well as identical amino acids; in this case, percentage of identity and percentage homology vary). Whether any two nucleic acid molecules have nucleotide sequences (or any two polypeptides have amino acid sequences) that are at least 70%, 80%, 85%, 90%, 91%, 92%, 93%, 94%, 95%, 96%, 97%, 98% or 99% “identical” can be determined using known computer algorithms such as the “FASTA” program, using for example, the default parameters as in Pearson et al. Proc. Natl. Acad. Sci. USA 85: 2444 (1988) (other programs include the GCG program package (Devereux, J., et al., Nucleic Acids Research 12(I): 387 (1984)), BLASTP, BLASTN, FASTA (Atschul, S. F., et al., J. Molec. Biol. 215:403 (1990); Guide to Huge Computers, Martin J. Bishop, ed., Academic Press, San Diego (1994), and Carillo et al. SIAM J Applied Math 48: 1073 (1988)). For example, the BLAST function of the National Center for Biotechnology Information database can be used to determine identity. Other commercially or publicly available programs include, DNAStar “MegAlign” program (Madison, Wis.) and the University of Wisconsin Genetics Computer Group (UWG) “Gap” program (Madison Wis.)). Percent homology or identity of proteins and/or nucleic acid molecules can be determined, for example, by comparing sequence information using a GAP computer program (e.g., Needleman et al. J. Mol. Biol. 48: 443 (1970), as revised by Smith and Waterman (Adv. Appl. Math. 2: 482 (1981)). Briefly, a GAP program defines similarity as the number of aligned symbols (i.e., nucleotides or amino acids) which are similar, divided by the total number of symbols in the shorter of the two sequences. Default parameters for the GAP program can include: (1) a unary comparison matrix (containing a value of 1 for identities and 0 for non identities) and the weighted comparison matrix of Gribskov et al. Nucl. Acids Res. 14: 6745 (1986), as described by Schwartz and Dayhoff, eds., Atlas of Protein Sequence and Structure, National Biomedical Research Foundation, pp. 353-358 (1979); (2) a penalty of 3.0 for each gap and an additional 0.10 penalty for each symbol in each gap; and (3) no penalty for end gaps.

[0190] Therefore, as used herein, the term “identity” represents a comparison between a test and a reference polypeptide or polynucleotide. In one non-limiting example, “at least 90% identical to” refers to percent identities from 90 to 100% relative to the reference polypeptides. Identity at a level of 90% or more is indicative of the fact that, assuming for exemplification purposes a test and reference polynucleotide length of 100 amino acids are compared, no more than 10% (i.e., 10 out of 100) of amino acids in the test polypeptide differs from that of the reference polypeptides. Similar comparisons can be made between a test and reference polynucleotides. Such differences can be represented as point mutations randomly distributed over the entire length of an amino acid sequence or they can be clustered in one or more locations of varying length up to the maximum allowable, e.g., 10/100 amino acid difference (approximately 90% identity). Differences are defined as nucleic acid or amino acid substitutions, insertions or deletions. At the level of homologies or identities above about 85-90%, the result should be independent of the program and gap parameters set; such high levels of identity can be assessed readily, often without relying on software.

[0191] As used herein, the phrase “sequence-related proteins” refers to proteins that have at least 50%, at least 60%, at least 70%, at least 80%, at least 90%, at least 91%, at least 92%, at least 93%, at least 94%, at least 95%, at least 96%, at least 97%, at least 98% or at least 99% amino acid sequence identity or homology with each other.

[0192] As used herein, families of non-related proteins or “sequence-non-related proteins” refer to proteins having less than 50%, less than 40%, less than 30%, less than 20% amino acid identity, or homology with each other.

[0193] As used herein, it also is understood that the terms “substantially identical” or “similar” varies with the context as understood by those skilled in the relevant art.

[0194] As used herein, “a naked polypeptide chain” refers to a polypeptide that is not post-translationally modified or otherwise chemically modified, but contains only covalently linked amino acids.

[0195] As used herein, a polypeptide complex includes polypeptides produced by chemical modification or post-translational modification. Such modifications include, but are not limited to, pegylation, albumination, glycosylation, farnysylation, hasylation, carbamylation, sulfation, carboxylation, hydroxylation, phosphorylation, and other polypeptide modifications known in the art.

[0196] As used herein, “output signal” refers to parameters that can be followed over time and, optionally, quantified. For example, when a recombinant protein is introduced into a cell, the cell containing the recombinant protein undergoes a number of changes. Any such change that can be monitored and used to assess the transformation or transfection is an output signal, and the cell is referred to as a reporter cell; the encoding nucleic acid is referred to as a reporter gene; and the construct that includes the encoding nucleic acid is a reporter construct. Output signals include, but are not limited to, enzyme activity, fluorescence, luminescence, amount of product produced, and other such signals. Output signals include expression of a gene or gene product, including heterologous genes (transgenes) inserted into the plasmid virus. Output signals are a function of time (“t”) and are related to the amount of protein used in the composition. For higher concentrations of protein, the output signal can be higher or lower. For any particular concentration, the output signal increases as a function of time until a plateau is reached. Output signals also can measure the interaction between cells, expressing heterologous genes and biological agents.

[0197] As used herein, a population of sets of nucleic acid molecules encoding a collection (or library) of mutants refers to a collection of plasmids or other vehicles that carry (i.e., encode) the gene variants. Thus, individual plasmids or other individual vehicles carry individual gene variants. Each element (or member) of the collection is physically separated from the others in an appropriate addressable array and has been generated as the single product of an independent mutagenesis reaction. When a collection (or library) of such proteins is contemplated, it will be so-stated. A collection (or library), contains three, four, five, 10, 50, 100, 500, 1000, 10³, 10⁴ or more modified EPO polypeptides or modified therapeutic polypeptides. As used herein, a “reporter cell” is the cell that undergoes the change in response to a condition. For example, in response to exposure to a protein or a virus or to a change in its external or internal environment, the reporter cell “reports” (i.e., displays or exhibits the change).

[0198] As used herein, “reporter” or “reporter moiety” refers to any moiety that allows for the detection of a molecule of interest, such as a protein expressed by a cell. Reporter moieties include, but are not limited to, fluorescent proteins (e.g., red, blue, and green fluorescent proteins), LacZ and other detectable proteins and gene products. For expression in cells, nucleic acids encoding the reporter moiety can be expressed as a fusion protein with a protein of interest or under to the control of a promoter of interest.

[0199] As used herein, phenotype refers to the physical, physiological, or other manifestation of a genotype (a sequence of a gene). In methods herein, phenotypes that result from alteration of a genotype are assessed.

[0200] As used herein, culture medium is any medium suitable for supporting the viability, growth, and/or differentiation of mammalian cells ex vivo. Any such medium known to those of skill in the art. Examples of culture medium include, but are not limited to, X-Vivo15 (BioWhittaker), RPMI 1640, DMEM, Ham=s F12, McCoys 5A and Medium 199. The medium can be supplemented with additional ingredients including serum, serum proteins, growth suppressing and growth promoting substances, such as mitogenic monoclonal antibodies and selective agents for selecting genetically engineered or modified cells.

[0201] As used herein, the amino acids that occur in the various sequences of amino acids provided herein are identified according to their known, three-letter or one-letter abbreviations (Table 1). The nucleotides which occur in the various nucleic acid fragments are designated with the standard single-letter designations used routinely in the art.

[0202] As used herein, an “amino acid” is an organic compound containing an amino group and a carboxylic acid group. A polypeptide comprises two or more amino acids. For purposes herein, amino acids include the twenty naturally-occurring amino acids, non-natural amino acids and amino acid analogs (e.g., amino acids wherein the α-carbon has a side chain).

[0203] As used herein, the abbreviations for any protective groups, amino acids and other compounds are, unless indicated otherwise, in accord with their common usage, recognized abbreviations, or the IUPAC-IUB Commission on Biochemical Nomenclature (1972) Biochem. 11: 1726. Each naturally occurring L-amino acid is identified by the standard three letter code (or single letter code) or the standard three letter code (or single letter code) with the preEPO “L-;” the preEPO “D-” indicates that the stereoisomeric form of the amino acid is D.

[0204] As used herein, “amino acid residue” refers to an amino acid formed upon chemical digestion (hydrolysis) of a polypeptide at its peptide linkages. The amino acid residues described herein are presumed to be in the “L” isomeric form. Residues in the “D” isomeric form, which are so designated, can be substituted for any L-amino acid residue as long as the desired functional property is retained by the polypeptide. “NH₂” refers to the free amino group present at the amino terminus of a polypeptide. “COOH” refers to the free carboxy group present at the carboxyl terminus of a polypeptide. In keeping with standard polypeptide nomenclature described in J. Biol. Chem., 243: 3552-3559 (1969), and adopted 37 C.F.R, §§1.821-1.822, abbreviations for amino acid residues are shown in Table 1:

TABLE 1
Table of Correspondence

SYMBOL

| 1-Letter | 3-Letter | AMINO ACID |
|---|---|---|
| Y | Tyr | tyrosine |
| G | Gly | glycine |
| F | Phe | phenylalanine |
| M | Met | methionine |
| A | Ala | alanine |
| S | Ser | serine |
| I | Ile | isoleucine |
| L | Leu | leucine |
| T | Thr | threonine |
| V | Val | valine |
| P | Pro | proline |
| K | Lys | lysine |
| H | His | histidine |
| Q | Gln | glutamine |
| E | Glu | glutamic acid |
| Z | Glx | Glu and/or Gln |
| W | Trp | tryptophan |
| R | Arg | arginine |
| D | Asp | aspartic acid |
| N | Asn | asparagine |
| B | Asx | Asn and/or Asp |
| C | Cys | cysteine |
| X | Xaa | Unknown or other |

[0205] It should be noted that all amino acid residue sequences represented herein by formulae have a left to right orientation in the conventional direction of amino-terminus to carboxyl-terminus. In addition, the phrase “amino acid residue” is broadly defined to include the amino acids listed in the Table of Correspondence (Table 1) and modified and unusual amino acids, such as those referred to in 37 C.F.R. §§1.821-1.822, and incorporated herein by reference. Furthermore, it should be noted that a dash at the beginning or end of an amino acid residue sequence indicates a peptide bond to a further sequence of one or more amino acid residues, to an amino-terminal group such as NH₂ or to a carboxyl-terminal group such as COOH.

[0206] As used herein, “naturally occurring amino acids” refer to the 20 L-amino acids that occur in polypeptides.

[0207] As used herein, the term “non-natural amino acid” refers to an organic compound that has a structure similar to a natural amino acid but has been modified structurally to mimic the structure and reactivity of a natural amino acid. Non-naturally occurring amino acids thus include, for example, amino acids or analogs of amino acids other than the 20 naturally occurring amino acids and include, but are not limited to, the D-isostereomers of amino acids. Exemplary non-natural amino acids are described herein and are known to those of skill in the art.

[0208] As used herein, nucleic acids include DNA, RNA and analogs thereof, including protein nucleic acids (PNA) and mixtures thereof. Nucleic acids can be single- or double-stranded. When referring to probes or primers (optionally labeled with a detectable label, e.g., a fluorescent or a radiolabel), single-stranded molecules are contemplated. Such molecules are typically of a length such that they are statistically unique of low copy number (typically less than 5, generally less than 3) for probing or priming a library. Generally a probe or primer contains at least 10, 15, 20, 25 or 30 contiguous of sequence complementary to, or identical to, a gene of interest. Probes and primers can be 5, 6, 7, 8, 9, 10 or more, 20 or more, 30 or more, 50 or more, 100 or more nucleic acids long.

[0209] As used herein, heterologous or foreign nucleic acid, such as DNA and RNA, are used interchangeably and refer to DNA or RNA that does not occur naturally as part of the genome in which it occurs or is found at a locus or loci in a genome that differs from that in which it occurs in nature. Heterologous nucleic acid includes nucleic acid not endogenous to the cell into which it is introduced, but that has been obtained from another cell or prepared synthetically. Generally, although not necessarily, such nucleic acid encodes RNA and proteins that are not normally produced by the cell in which it is expressed. Heterologous DNA herein encompasses any DNA or RNA that one of skill in the art recognizes or considers as heterologous or foreign to the cell or locus in or at which it is expressed. Heterologous DNA and RNA also can encode RNA or proteins that mediate or alter expression of endogenous DNA by affecting transcription, translation, or other regulatable biochemical processes. Examples of heterologous nucleic acid include, but are not limited to, nucleic acid that encodes traceable marker proteins (e.g., a protein that confers drug resistance), nucleic acid that encodes therapeutically effective substances (e.g., anti-cancer agents), enzymes and hormones, and DNA that encodes other types of proteins (e.g., antibodies). Hence, herein heterologous DNA or foreign DNA includes a DNA molecule not present in the exact orientation and position as the counterpart DNA molecule found in the genome. It also can refer to a DNA molecule from another organism or species (i.e., exogenous).

[0210] As used herein, “isolated with reference to a nucleic acid molecule or polypeptide or other biomolecule” means that the nucleic acid or polypeptide has separated from the genetic environment from which the polypeptide or nucleic acid was obtained. It also can mean altered from the natural state. For example, a polynucleotide or a polypeptide naturally present in a living animal is not “isolated,” but the same polynucleotide or polypeptide separated from the coexisting materials of its natural state is “isolated,” as the term is employed herein. Thus, a polypeptide or polynucleotide produced and/or contained within a recombinant host cell is considered isolated. Also intended as an “isolated polypeptide” or an “isolated polynucleotide” are polypeptides or polynucleotides that have been partially or substantially purified from a recombinant host cell or from a native source. For example, a recombinantly produced version of a compound can be substantially purified by the one-step method described in Smith et al., Gene, 67:31-40 (1988). The terms isolated and purified can be used interchangeably.

[0211] Thus, by “isolated” it is meant that the nucleic acid is free of coding sequences of those genes that, in the naturally-occurring genome of the organism (if any), immediately flank the gene encoding the nucleic acid of interest. Isolated DNA can be single-stranded or double-stranded, and can be genomic DNA, cDNA, recombinant hybrid DNA or synthetic DNA. It can be identical to a starting DNA sequence or can differ from such sequence by the deletion, addition or substitution of one or more nucleotides.

[0212] “Purified” preparations made from biological cells or hosts mean cell extracts containing the indicated DNA or protein, including a crude extract of the DNA or protein of interest. For example, in the case of a protein, a purified preparation can be obtained following an individual technique or a series of preparative or biochemical techniques, and the DNA or protein of interest can be present at various degrees of purity in these preparations. The procedures can include, but are not limited to, ammonium sulfate fractionation, gel filtration, ion exchange chromatography, affinity chromatography, density gradient centrifugation and electrophoresis.

[0213] A preparation of DNA or protein that is “substantially pure” or “isolated” refers to a preparation substantially free from naturally-occurring materials with which such DNA or protein is normally associated in nature and generally contains 5% or less of the other contaminants.

[0214] A cell extract that contains the DNA or protein of interest refers to a homogenate preparation or cell-free preparation obtained from cells that express the protein or contain the DNA of interest. The term “cell extract” is intended to include culture medium, especially spent culture medium from which the cells have been removed.

[0215] As used herein, “a targeting agent” refers to any molecule that can bind another target-molecule, such as an antibody, receptor or ligand.

[0216] As used herein, “receptor” refers to a biologically active molecule that specifically binds to (or with) other molecules. The term “receptor protein” can be used to more specifically indicate the proteinaceous nature of a specific receptor.

[0217] As used herein, “recombinant” refers to any progeny formed as the result of genetic engineering.

[0218] As used herein, a “promoter region” refers to the portion of DNA of a gene that controls transcription of the DNA to which it is operatively linked. The promoter region includes specific sequences of DNA sufficient for RNA polymerase recognition, binding and transcription initiation. This portion of the promoter region is referred to as the “promoter”. In addition, the promoter region includes sequences that modulate this recognition, binding and transcription initiation activity of the RNA polymerase. Promoters, depending upon the nature of the regulation, can be constitutive or regulated by cis acting or trans acting factors.

[0219] As used herein, the phrase “operatively linked” with reference to a nucleic acid molecule generally means the sequences or segments have been covalently joined into one piece of DNA, whether in single- or double-stranded form, whereby control or regulatory sequences on one segment control or permit expression or replication or other such control of other segments. The two segments are not necessarily contiguous. For gene expression, a DNA sequence and a regulatory sequence(s) are connected in such a way to control or permit gene expression when the appropriate molecular, e.g., transcriptional activator proteins, are bound to the regulatory sequence(s).

[0220] As used herein, “production by recombinant means by using recombinant DNA methods” means the use of the well-known methods of molecular biology for expressing proteins encoded by cloned DNA, including cloning expression of genes and methods.

[0221] As used herein, a splice variant refers to a variant produced by differential processing of a primary transcript of genomic DNA that results in more than one type of mRNA.

[0222] As used herein, a composition refers to any mixture of two or more products or compounds (e.g., agents, modulators, regulators, etc.). It can be a solution, a suspension, liquid, powder, a paste, aqueous, non-aqueous formulations or any combination thereof.

[0223] As used herein, a combination refers to any association between two or more items. Items of a combination for administration to a subject can be administered separately or together, used simultaneously or sequentially, or packaged together or packaged separately.

[0224] As used herein, an “article of manufacture” is a product that is made and sold. As used throughout this application, the term is intended to encompass pharmaceutical compositions of modified EPO polypeptides or other modified therapeutic polypeptides and/or nucleic acids as described herein contained in articles of packaging.

[0225] As used herein, a “kit” refers to a combination of modified polypeptides or nucleic acid molecules as described herein provided in pharmaceutical compositions and another item for a purpose including, but not limited to, administration, diagnosis, and assessment of an activity or property of the polypeptides described herein. Kits, optionally, include instructions for use.

[0226] As used herein, “substantially identical to a product” means sufficiently similar so that the property of interest is sufficiently unchanged so that the substantially identical product can be used in place of the product.

[0227] As used herein, the term “vector” refers to a nucleic acid molecule capable of transporting another nucleic acid to which it has been linked. One type of exemplary vector is an episome, i.e., a nucleic acid capable of extra-chromosomal replication. Exemplary vectors are those capable of autonomous replication and/or expression of nucleic acids to which they are linked; such vectors typically include origins of replication. Vectors also can be designed for integration into host chromosomes. Vectors capable of directing the expression of genes to which they are operatively linked are referred to herein as “expression vectors.” Expression vectors are often in the form of “plasmids,” which refer generally to circular double-stranded DNA loops which, in their vector form are not bound to the chromosome. “Plasmid” and “vector” are used interchangeably as the plasmid is the most commonly used form of vectors. Other such other forms of expression vectors that serve equivalent functions and that become known in the art subsequently hereto.

[0228] As used herein, vector also includes “virus vectors” or “viral vectors.” Viral vectors are engineered viruses that are operatively linked to exogenous genes to transfer (as vehicles or shuttles) the exogenous genes into cells.

[0229] As used herein, “allele,” which is used interchangeably herein with “allelic variant” refers to alternative forms of a gene or portions thereof among a population. Alleles occupy the same locus or position on homologous chromosomes. When a subject has two identical alleles of a gene, the subject is said to be homozygous for that gene or allele. When a subject has two different alleles of a gene, the subject is said to be heterozygous for the gene. Alleles of a specific gene can differ from each other in a single nucleotide or several nucleotides, and can include substitutions, deletions and insertions of nucleotides. An allele of a gene also can be a form of a gene containing a mutation. Typically, allelic variants, have at least 80%, 90%, 91%, 92%, 93%, 94%, 95%, 96%, 97%, 98%, 99% or greater amino acid identity with a wild-type and/or predominant form from the same species.

[0230] As used herein, the terms “gene” or “recombinant gene” refer to a nucleic acid molecule containing an open reading frame and including at least one exon and, optionally, an intron-encoding sequence. A gene can be either RNA or DNA. Genes can include regions preceding and following the coding region (leader and trailer).

[0231] As used herein, “intron” refers to a DNA fragment that occurs in a gene, but is spliced out during mRNA maturation.

[0232] As used herein, “nucleotide sequence complementary to the nucleotide sequence encoding the amino acid sequence set forth in SEQ ID NO: 1” refers to the nucleotide sequence of the complementary strand of a nucleic acid strand encoding a polypeptide that includes an amino acid sequence having the particular SEQ ID NO: 1.

[0233] The term “complementary strand” is used herein interchangeably with the term “complement.” The complement of a nucleic acid strand can be the complement of a coding strand or the complement of a non-coding strand. When referring to double-stranded nucleic acids, the complement of a nucleic acid encoding a polypeptide containing amino acid residues having a sequence set forth in a particular SEQ ID NO: 1 refers to the complementary strand of the strand encoding the amino acid sequence set forth in the particular SEQ ID NO: 1 or to any nucleic acid molecule containing the nucleotide sequence of the complementary strand of the particular nucleic acid sequence. When referring to a single-stranded nucleic acid molecule containing a nucleotide sequence, the complement of this nucleic acid is a nucleic acid having a nucleotide sequence which is complementary to that of the particular nucleic acid sequence.

[0234] As used herein, the term “coding sequence” refers to that portion of a gene that encodes a sequence of amino acids present in a protein.

[0235] As used herein, the term “sense strand” refers to that strand of a double-stranded nucleic acid molecule that has the sequence of the mRNA that encodes the sequence of amino acids encoded by the double-stranded nucleic acid molecule.

[0236] As used herein, the term “antisense strand” refers to that strand of a double-stranded nucleic acid molecule that is the complement of the sequence of the mRNA that encodes the sequence of amino acids encoded by the double-stranded nucleic acid molecule.

[0237] As used herein, an “array” refers to a collection of elements, such as nucleic acid molecules, containing three or more members. An addressable array is one in which the members of the array are identifiable, typically by position on a solid phase support or by virtue of an identifiable or detectable label, such as by color, fluorescence, electronic signal (e.g., RF, microwave or other frequency that does not substantially alter the interaction of the molecules of interest), bar code or other symbology, chemical or other such label. In certain embodiments, the members of the array are immobilized to discrete identifiable loci on the surface of a solid phase or directly or indirectly linked to or otherwise associated with the identifiable label, such as affixed to a microsphere or other particulate support (herein referred to as beads) and suspended in solution or spread out on a surface.

[0238] As used herein, a “support” (e.g., a matrix support, a matrix, an insoluble support or solid support, etc.) refers to any solid or semisolid or insoluble support to which a molecule of interest (e.g., a biological molecule, organic molecule or biospecific ligand) is linked or contacted. Such materials include any materials that are used as affinity matrices or supports for chemical and biological molecule syntheses and analyses, such as, but are not limited to: polystyrene, polycarbonate, polypropylene, nylon, glass, dextran, chitin, sand, pumice, agarose, polysaccharides, dendrimers, buckyballs, polyacrylamide, silicon, rubber, and other materials used as supports for solid phase syntheses, affinity separations and purifications, hybridization reactions, immunoassays and other such applications. The matrix herein can be particulate or can be in the form of a continuous surface, such as a microtiter dish or well, a glass slide, a silicon chip, a nitrocellulose sheet, nylon mesh, or other such materials. When particulate, typically the particles have at least one dimension in the 5-10 mm range or smaller. Such particles, referred collectively herein as “beads,” are often, but not necessarily, spherical. Such reference, however, does not constrain the geometry of the matrix, which can be any shape, including random shapes, needles, fibers, and elongated. Roughly spherical “beads,” particularly microspheres that can be used in the liquid phase, also are contemplated. The “beads” can include additional components, such as magnetic or paramagnetic particles (see, for example, Dynabeads (Dynal, Oslo, Norway)) for separation using magnets as long as the additional components do not interfere with the methods and analyses herein.

[0239] As used herein, matrix or support particles refer to matrix materials that are in the form of discrete particles. The particles have any shape and dimensions, but typically have at least one dimension that is 100 mm or less, 50 mm or less, 10 mm or less, 1 mm or less, 100 μm or less, 50 μm or less and typically have a size that is 100 mm³ or less, 50 mm³ or less, 10 mm³ or less, and 1 mm³ or less, 100 μm³ or less and can be order of cubic microns. Such particles are collectively called “beads.”

[0240] As used herein, a control refers to a sample that is substantially identical to the test sample, except that it is not treated with a test parameter, or, if it is a plasma sample, it can be from a normal volunteer not affected with the condition of interest. A control also can be an internal control.

[0241] As used herein, the singular forms “a,” “an” and “the” include plural referents unless the context clearly dictates otherwise. Thus, for example, reference to a compound, comprising “an extracellular domain” includes compounds with one or a plurality of extracellular domains.

[0242] As used herein, ranges and amounts can be expressed as “about” a particular value or range. About also includes the exact amount. Hence “about 5 bases” means “about 5 bases” and also “5 bases.”

[0243] As used herein, “optional” or “optionally” means that the subsequently described event or circumstance does or does not occur, and that the description includes instances where said event or circumstance occurs and instances where it does not. For example, an optionally substituted group means that the group is unsubstituted or is substituted.

[0244] As used herein, the abbreviations for any protective groups, amino acids and other compounds are, unless indicated otherwise, in accord with their common usage, recognized abbreviations, or the IUPAC-IUB Commission on Biochemical Nomenclature (1972) Biochem., 11: 942-944.

### B. ERYTHROPOIETIN (EPO)

[0245] Erythropoietin (EPO) is a member of the hematopoietic growth factor family that acts as a hormone. It is responsible for the regulation of red blood cell (erythrocyte) production (erythropoiesis) and maintaining the body's red blood cell mass at an optimum level. EPO production is stimulated by reduced oxygen content in the renal arterial circulation, mediated by a transcription factor that is oxygen-sensitive. EPO is produced primarily by cells of the peritubular capillary endothelium of the kidney. Secreted EPO binds to EPO receptors on the surface of bone marrow erythroid precursors, resulting in their rapid replication and maturation to functional red blood cells. This stimulation results in a rapid rise in erythrocyte counts and a consequent rise in hematocrit (% of red blood cells in blood) (D'Andrea et al. (1989) Cell 57: 277-285; Lodish et al. (1995) Cold Spring Harb Symp Quant Biol 60: 93-104).

[0246] Recently, several lines of evidence suggest that erythropoietin, as a member of the cytokine superfamily, performs other important physiologic functions which are mediated through interaction with the erythropoietin receptor (EPOR). These actions include mitogenesis, modulation of calcium influx into smooth muscle cells and neural cells, production of erythrocytes, hyperactivation of platelets, production of thrombocytes, and effects on intermediary metabolism. It is believed that erythropoietin provides compensatory responses that serve to improve hypoxic cellular microenvironments as well as modulate programmed cell death caused by metabolic stress. Hence, in addition to its erythropoietic activity, EPO exhibits tissue protective capabilities. Further, such tissue protective activities appear to be independent of its hematopoietic function.

[0247] Human EPO was first cloned and amino acid sequence reported by Lin et al. (1985) Proc Nat Acad Sci USA 82: 7580-4 and Jacobs et al. (1985) Nature 313: 806-810. Human EPO is an acidic glycoprotein with a molecular weight of approximately 30,400 Daltons. The precursor sequence of human EPO is a 193 amino acid polypeptide (set forth in SEQ ID NO:1), including a 27 amino acid signal sequence corresponding to amino acid residues 1-27 in the sequence of amino acids set forth in SEQ ID NO:1. The mature polypeptide is composed of a 166 amino acid single polypeptide chain (set forth in SEQ ID NO:2), which is processed to a 165 amino acid polypeptide (set forth in SEQ ID NO:237) by a posttranslational modification involving cleavage of arginine 166 by a carboxypeptidase. Hence, EPO exists in a 165 form, but can exist as a 166 amino acid form, or as a heterogenous molecule of 165 or 166 amino acids. EPO contains four cysteine residues (at positions 7, 29, 33 and 161 of the mature protein set forth in SEQ ID NO:2), which form internal disulphide bonds (Lai et al. (1986) J Biol Chem 261: 3116-3121; Recny et al. (1987) J Biol Chem 262: 17156-17163). The disulphide bridge between cysteine 7 and 161 is important for erythropoietic activity. The structure of human EPO has been reported and described in Cheetham et al. (1988) Nat Struct Biol 5:861-866 and Syed et al. (1998) Nature 395:511-516. Human EPO is a four helix bundle, typical of members of the hematopoietic growth factor family.

[0248] In vivo, EPO is post-translationally modified by glycosylation. The carbohydrate portion of EPO consists of three N-linked sugars chains at Asn 24, 38 and 83, and one O-linked sugar at Ser 126 (see e.g., Browne et al. (1986) Cold Spring Harb Symp Quant Bio151: 693-702; Egrie et al. (1986) Immunbiology 172: 213-224) of the mature EPO polypeptide set forth in SEQ ID NO:2. The carbohydrate structures that are attached to EPO are variable, a feature referred to as micro-heterogeneity. The differences in carbohydrate moieties, in terms of the branching pattern, complexity size and charge have profound effects on the pharmacokinetics and pharmacodynamics of EPO. The effects of different glycosylation patterns have been well studied (see e.g., Darling et al. (2002)Biochemistry 41: 14524-14531; Stoning et al. (1998) Br J Haematol 100: 79-89; Halstenson et al. (1991 Clin Pharmacol Ther 50: 702-712; Takeuchi et al. (1990) J Biol Chem 265: 12127-12130).

[0249] Generally, glycosylation of proteins is important in conferring solubility, stability, protection from immune attack and overall biological activity. For EPO, for example, the glycosylation sites in the glycoprotein have been implicated in the activity, biosynthesis and processing, half-life, maintaining an active conformation and in its homing to the bone marrow and its biological activity (Dube et al. (1988) J Biol. Chem., 263:17516-17521; Cointe et al. (2000) Glycobiology, 10:511-519). For example, EPO polypeptide isoforms containing increased carbohydrate content generally exhibit increased serum half-life. The serum half-life of an EPO polypeptide produced in CHO cells is about 2 hours compared to a non-glycosylated EOP, which has a half-life measured in minutes. The half-life of glycosylated forms of EPO still exhibit a relatively short half-life. Hence, efforts have been made to generate EPO polypeptides having improved half-life.

[0250] EPO is produced by hepatocytes during the fetal stage, and also by renal fibroblasts and neuronal cells. The human urinary EPO and recombinant human EPO (rHuEPO) produced recombinantly in cells share the same primary sequence, but they differ in their glycosylation pattern. In addition, different rHuEPO's contain different glycosylation patterns depending on the cell line used to produce it. rHuEPO has been generated by recombinant engineering in CHO cells (i.e. epoietin alpha and beta discussed below), baby hamster kidney cells (BHK; i.e. epoetin omega); RPMI 1,788 human lymphoblastoid; COS African green monkey kidney; MDCK canine kidney; L929 mouse fibroblast and C127 mouse mammary (Jelkmann et al. (2004) Internal Medicine, 43:649-659). Differences in the glycosylation of the different EPO preparations affects the in vivo survival of the EPO when administered as a therapeutic drug.

[0251] EPO is a major biopharmaceutical product with world-wide sales topping US $3 billion. It is used primarily to boost erythrocyte and red blood cell formation in patients to treat anemia associated with chronic renal failure, cancer chemotherapy, HIV infection, pediatric use, premature infants and to reduce the need for blood transfusions in anemic patients undergoing elective non-cardiac and non-vascular surgery. Other indications for rHuEPO therapy may be the anaemias associated with autoimmune diseases, AIDS, hepatitis C infection, congestive heart failure or surgical intervention. In humans, treatment with doses of EPO has been found to be safe and well-tolerated.

[0252] There are a variety of commercially available EPO polypeptides. Many EPO polypeptides have the same amino acid sequence as human EPO (rhEPO) and variations in the methods of production and glycosylation distinguish these products. Epoetin a (generated from genomic DNA) and epoetin β (generated from cDNA) are described in U.S. Pat. Nos. 4,703,008 and 5,955,422. These polypeptides have the same amino acid sequence as human EPO and are produced in Chinese hamster ovary (CHO) cells. Epoetin a is available under the trade names Procrit® (Ortho Biotech), Eprex® (Johnson & Johnson), Epogin® (Chugai) or Epogen® (Amgen). Epoetin β is available under the trade name Neorecormon® or Recormon® (Hoffmann-La Roche). It was developed by the Genetics Institute for the treatment of anemia associated with renal disease. Epoetin ω, described in U.S. Pat. No. 5,688,679, has the same amino acid sequence as human EPO and is produced in baby hamster kidney cells (BHK-21). Epoetin ω is available under the trade names Epomax® (Elanex). Generally, rHuEPO alpha and rHuEPO beta, when administered intravenously or subcutaneously exhibit a half-life of 6-8 hours. Dynepo (Epoetin δ; developed by Transkaryotic Therapies (in conjunction with Aventis Pharma)) is a gene-activated human erythropoietin, produced in human cell culture, for the treatment of anemia in patients with renal failure.

[0253] Other EPO polypeptides have been developed in attempts to increase the half-life and bioavailability of the polypeptide. Darbepoetin α (also known as Novel Erythropoiesis Stimulating Protein, NESP) was developed by Amgen and is available under the trade name Aranesp® (Macdougall (2002) Kidney Int Suppl. 80:55-61). It was designed to contain five N-linked carbohydrate chains (two more than rhEPO). The amino acid sequence of Aranesp® differs from that of rhEPO at five amino acid substitutions (A30N, H32T, P87V, W88N, P90T (SEQ ID NO: 228)), thus allowing for additional oligosaccharide attachment at asparagine residues at positions 30 and 88. Due to its increased carbohydrate content, Aranesp® differs from rhEPO as a result of a higher molecular weight (37,100 compared to 30,400 Daltons), sialic acid content (22 compared to 14 sialic acid residues), and increased negative charge. The increased carbohydrate content of Aranesp® accounts for its distinct biochemical and biological properties, in particular a 3-fold longer circulating half-life than other existing erythropoietins when administered via the intravenous (i.v.) or subcutaneous (s.c.) route, i.e. 24-26 hours. However, the relative EPO receptor binding affinity was inversely correlated with the carbohydrate content, with Aranesp® displaying a 4.3-fold lower relative affinity for the EPO receptor than that of rhEPO. Following subcutaneous administration, the absorption of Aranesp® is slow and rate-limiting, serum levels reaching a maximum at a mean of 54 h. The time to maximum concentration is longer than that reported for rhEPO, probably because of the increased molecular size of Aranesp®. However currently, the extended circulating half-life gives Aranesp® a significant clinical advantage over Procrit® due to its less frequent dosing.

[0254] Other attempts have been made to extend the half-life of EPO through chemical conjugation with polyethylene glycol (PEG). PEGylated EPO, though having a longer half-life, exhibits altered structure and reduced function compared to non-PEGylated EPO. For example, continuous erythropoietin receptor activator (CERA; developed by Roche), or R-744, is a second-generation erythropoietin, for the potential treatment of anemia associated with chemotherapy. CERA contains a single methoxypolyethylene glycol polymer of approximately 30 Kda that extends the half life of this agent. Other mechanisms of increasing the half-life, include, but are not limited to, linkage of EPO to a carrier protein such as albumin, formation of homodimerization of two complete EPO molecules by using linking peptides (3-to 17-amino acids), by chemical cross-linking using various reagents, or by combining the EPO molecule with the Fc fragment of human immunoglobulin (Ig) as a fusion protein. Each of these strategies results in an EPO polypeptide having altered activity compared to native EPO.

[0255] EPO can be administered orally, systemically, buccally, transdermally, intravenously, intramuscularly and subcutaneously and, typically, multiple administrations are used in treatment regimens. Generally, commercially available EPO therapeutics are administered as an injection by subcutaneous, intravenous and intraperitoneal administration. Typically, subcutaneous administration is more effective, although the bioavailability of native EPO is only 26% via subcutaneous administration. Due to the relatively short half-life, native EPO must be administered by injection 3 times a week. Also, the formulations are typically stored in refrigerated (2-8° C.) conditions to ensure retention of activity. Hence, improved EPO stability (half-life) in administered conditions (in vivo), such as stability in serum, and in vitro (e.g., during production, purification and storage conditions) can improve its utility and efficiency as a drug.

### C. MODIFIED EPO POLYPEPTIDES EXHIBITING INCREASED PROTEIN STABILITY

[0256] Provided herein are variants of the EPO polypeptide that display improved stability as assessed by resistance to proteases (blood, intestinal, etc). Increased stability of EPO polypeptides can be achieved, for example, by destruction of protease target residues or sequences, thereby rendering the polypeptide resistant to degradation by proteases upon administration, purification or storage. The proteases are modified to be protease resistant by virtue of changes in their primary sequence at sites that are susceptible to degradation by proteases. For example, amino acid replacement of protease target residue or sequence results in direct destruction of the protease target residue or sequence. Hence, provided herein are modified EPO polypeptides in which the primary amino acid sequence is modified to confer increased resistance to proteases, without the additional need for other post-translational or other modifications.

[0257] The protease resistant EPO polypeptides provided herein are modified with only a few amino acid changes (in many cases only a single change) in the primary sequence of the polypeptide. The mutations in the primary sequence themselves render the protease resistant to polypeptides. Further, because the polypeptide only contains a few changes, it can retain its activity to levels equal to, or in some cases greater than, the activity of the same polypeptide absent the mutations. This has advantages for several reasons. First, this means that the amount of polypeptide (i.e. dosage) required to achieve a therapeutic effect is not limited by any change (i.e. decrease) of activity of the polypeptide. This is a problem with many therapeutic polypeptides, such as, for example, pegylated polypeptides, where the modification to the polypeptide renders the protein less active. Thus, to achieve a therapeutic effect, such therapeutic polypeptides must be administered at a higher dose.

[0258] Second, a change to only the primary sequence of the polypeptide means that there is no other processing requirements or requirements for mixing the therapeutic protein with other compounds in the formulation to effect protease resistance or absorption of the polypeptide into the bloodstream. Accordingly, the manufacturing of the dosage formulations is simplified. For example, tablets containing only the lyophilized protein can be manufactured for oral administration, i.e. the protease resistant proteins are orally available per se. It also can be advantageous to include the polypeptide in an enteric coating in order to further increase resistance of the polypeptides to protease, particularly upon route to the gastrointestinal tract upon oral administration.

[0259] The modified EPO polypeptides display improved stability as assessed by resistance to proteases; the modified EPO polypeptides exhibiting these properties possess, thereby, increased protein half-life in vitro or in vivo. The modified EPO polypeptides (also referred to herein as variants) are more stable compared to unmodified EPO polypeptides. A modified EPO polypeptide provided herein exhibiting increased protein stability can lead to an increased half-life of the polypeptide in vitro (e.g., during production, purification and storage) or in vivo (e.g., after administration to a subject). For example, increased half-life can occur following administration of the polypeptide to a subject, such as a human subject. The increased half-life of the modified EPO polypeptide can be increased by an amount that is at least about or 1%, 2%, 3%, 4%, 5%, 6%, 7%, 8%, 9%, 10%, 20%, 30%, 40%, 50%, 60%, 70%, 80%, 90%, 91%, 92%, 93%, 94%, 95%, 96%, 97%, 98%, 99%, 100%, 200%, 300%, 400%, 500%, or more compared to the half-life of the unmodified EPO polypeptide. In some examples, the increased half-life of the modified EPO polypeptide can be increased by an amount that is at least 6 times, 7 times, 8 times, 9 times, 10 times, 20 times, 30 times, 40 times, 50 times, 60 times, 70 times, 80 times, 90 times, 100 times, 200 times, 300 times, 400 times, 500 times, 600 times, 700 times, 800 times, 900 times, 1000 times, or more times when compared to the half-life of the unmodified EPO polypeptide. Hence, the modified EPO polypeptides provided herein offer EPO with advantages including a decrease in the frequency of injections needed to maintain a sufficient drug level in serum, thus leading to, for example, higher comfort and acceptance by subjects, lower doses necessary to achieve comparable biological effects and attenuation of secondary effects.

[0260] The EPO variants that exhibit improved stability possess increased stability in administration conditions such as in the bloodstream, gastrointestinal tract, mouth, throat, and/or under storage conditions. Increasing stability (i.e., the half-life of proteins in vivo) can result in a decrease in the frequency of injections needed to maintain a sufficient drug level in serum, thus leading to: i) higher comfort to, and acceptance by, treated subjects, particularly human subjects, ii) lower doses necessary to achieve comparable biological effects, and iii) as a consequence, an attenuation of the (dose-dependent) secondary effects. Further, resistance to protease renders the polypeptide suitable for oral delivery, since it is less susceptible to digestion to proteases found in the gastrointestinal tract.

[0261] Thus, by virtue of resistance to proteases in the gastrointestinal tract, EPO variants provided herein can be formulated for oral administration. For therapeutic proteins that are not modified to be protease resistant by virtue of changes in their primary sequence, no amount of protein can be administered via oral administration that achieves delivery of therapeutically effective amounts of native, or wild-type, polypeptides to the bloodstream. This results from degradation of the polypeptides in the gastrointestinal tract by gastrointestinal proteases. Although native polypeptides such as EPO can be formulated with coatings for enteric delivery this is not sufficient to effect resistance to proteases in the gastrointestinal tract to allow for release into the bloodstream. Once the enteric coating is dissolved and the native polypeptides are released into the lumen of the gastrointestinal tract, high levels of proteolytic degradation of the polypeptides prevent efficient absorption of the polypeptides from the intestine into the blood. The EPO protease-resistant polypeptides provided herein are resistant to degradation by proteases, such as gastrointestinal proteases, and therefore are available for absorption and uptake into the blood. When released into the lumen of the gastrointestinal tract, the protease-resistance peptides are present in high concentrations due do their resistance to intestinal proteases. As a result, therapeutically effective amounts of the proteases can be absorbed from the intestine into the bloodstream. Additionally, resistance to proteolytic degradation in the digestive tract and in the bloodstream allows for sustained uptake of the protease-resistant therapeutic polypeptides. Hence, the protease-resistant polypeptides can be absorbed and maintained at therapeutically effective concentrations in the bloodstream over longer periods of time. Thus, the protease-resistant polypeptides can be administered orally. As discussed herein, such protease-resistant EPO polypeptides can be formulated for oral administration as tablets or capsules. Advantageously, they include enteric coatings that protect against the pH conditions of the stomach and allow for efficient delivery of the polypeptides to the lower digestive tract.

[0262] Modifications that increase protease resistance compensate for lack of glycosylation of the EPO polypeptide that can occur due to production of the protein in hosts that are not capable of glycosylation or following administration and exposure to glycolytic action of proteases. Hence, modification of protease sensitive sites that normally are masked by glycosylation can provide a protective measure to the EPO polypeptide when those sites become unmasked and exposed to proteases (i.e. serum, blood, intestinal) to provide increased stability of the polypeptide compared to a polypeptide not containing such modifications. Thus, while glycosylation sites can shield the protein from proteases, and thereby increase the half-life of the polypeptide, EPO polypeptides that are not glycosylated or are partially glycosylated are not so protected. Accordingly, by modifying the EPO polypeptide to exhibit increased protease resistance, particularly at sites normally masked by glycosylation, the polypeptide is rendered as protected or more protected than a fully glycosylated EPO polypeptide.

[0263] 1. Protease Resistance

[0264] The delivery of stable peptide and protein drugs to patients is a major challenge for the pharmaceutical industry. These types of drugs in the human body are constantly eliminated or taken out of circulation by different physiological processes including internalization, glomerular filtration and proteolysis. The latter is often the limiting process affecting the half-life of proteins used as therapeutic agents in per-oral administration and either intravenous or intramuscular injections. Hence, of interest are therapeutic proteins that increase protein stability manifested as an increased resistance to digestion by proteases. Among modifications for therapeutic proteins are those that increase protection against protease digestion without destroying or eliminating a therapeutic or the therapeutic activity. Such changes are useful for producing longer-lasting therapeutic proteins. Thus, in one aspect, the EPO polypeptides provided herein have been modified to increase resistance to proteolysis, thereby increasing the half-life of the modified EPO polypeptide in vitro (e.g., production, processing, storage, assay, etc.) or in vivo (e.g., serum stability). Thus, the modified EPO polypeptides provided herein are useful as longer-lasting therapeutic proteins. Increasing protein stability to proteases (blood, lysate, intestinal, serum, etc.), is contemplated herein to provide a longer in vivo half-life for the particular protein molecules and, thus, a reduction in the frequency of necessary administrations to subjects. It also is contemplated that increasing protease stability by conferring protease resistance results in a polypeptide that can be orally administered.

[0265] Proteases, proteinases or peptidases catalyze the hydrolysis of covalent peptide bonds. Modified EPO polypeptides provided herein exhibit increased resistance to proteolysis by proteases, including those that occur, for example, in body fluids and tissues, such as those that include, but are not limited to, saliva, blood, serum, intestinal, stomach, blood, cell lysates, cells and others. These include proteases of all types, such as, for example, serine proteases and matrix metalloproteinases.

[0266] Modifications of EPO polypeptides include, but are not limited to, resistance to one or more proteases including, but not limited to, pepsin, trypsin, chymotrypsin, elastase, aminopeptidase, gelatinase B, gelatinase A, α-chymotrypsin, carboxypeptidase, endoproteinase Arg-C, endoproteinase Asp-N, endoproteinase Glu-C, endoproteinase Lys-C, luminal pepsin, microvillar endopeptidase, dipeptidyl peptidase, enteropeptidase, hydrolase, NS3, factor Xa, Granzyme B, thrombin, plasmin, urokinase, tPA and PSA.

[0267] Modified EPO polypeptides provided herein exhibit increased resistance to proteolysis, particularly by enzymes present in serum, blood, the gut, the mouth and other body fluids. Such increase in resistance is manifested as increased half-life of the EPO polypeptide by an amount that is at least about or 1%, 2%, 3%, 4%, 5%, 6%, 7%, 8%, 9%, 10%, 20%, 30%, 40%, 50%, 60%, 70%, 80%, 90%, 91%, 92%, 93%, 94%, 95%, 96%, 97%, 98%, 99%, 100%, 200%, 300%, 400%, 500%, or more compared to the unmodified or wild-type EPO polypeptide in either in vivo (human blood, human serum, saliva, digestive fluid, the intestinal tract, etc.), or an in vitro mixture containing one or more proteases. Typically, the half-life in vitro or in vivo of the modified EPO polypeptides provided herein is increased by an amount selected from at least about or 1%, 2%, 3%, 4%, 5%, 6%, 7%, 8%, 9%, 10%, 20%, 30%, 40%, 50%, 60%, 70%, 80%, 90%, 91%, 92%, 93%, 94%, 95%, 96%, 97%, 98%, 99%, 100%, 200%, 300%, 400%, 500%, or more when compared to the half-life of unmodified or wild-type EPO in either blood, serum, or in an in vitro preparation or an in vitro mixture containing one or more proteases.

[0268] Typically, the modified EPO polypeptides provided herein exhibit at least one activity that is substantially unchanged (less than 1%, 5% or 10% changed) compared to the unmodified or wild-type EPO. In some examples, the activity is increased compared to the unmodified EPO. In other examples, the activity is decreased compared to the unmodified EPO polypeptide. Activity includes, for example, erythropoietic or tissue protective activity, and can be compared to the unmodified polypeptide, such as for example, the mature, wild-type native EPO polypeptide (SEQ ID NO: 2 or 237), the wild-type precursor EPO polypeptide (SEQ ID NO: 1 or 236), or any other EPO polypeptide used as the starting material.

[0269] a. Serine Proteases

[0270] Serine proteases participate in a range of functions in the body, including blood clotting, inflammation as well as digestive enzymes in prokaryotes and eukaryotes. Serine proteases are sequence specific. While cascades of protease activations control blood clotting and complement, other proteases are involved in signaling pathways, enzyme activation and degradative functions in different cellular or extracellular compartments.

[0271] Serine proteases include, but are not limited, to chymotrypsin, trypsin, elastase, NS3, factor Xa, Granzyme B, thrombin, plasmin, urokinase, tPA and PSA. Chymotrypsin, trypsin and elastase are synthesized by the pancreatic acinar cells, secreted in the small intestine and are responsible for catalyzing the hydrolysis of peptide bonds. All three of these enzymes are similar in structure, as shown through their X-ray structures. Each of these digestive serine proteases targets different regions of the polypeptide chain, based upon the amino acid residues and side chains surrounding the site of cleavage. The active site of serine proteases is shaped as a cleft where the polypeptide substrate binds. Amino acid residues are labeled from N to C term of the polypeptide substrate (Pi, . . . , P3, P2, P1, P1′, P2′, P3′, . . . Pj) and their respective binding sub-sites (Si, . . . , S3, S2, S1, S1′, S2′, S3′, . . . , Sj). The cleavage is catalyzed between P1 and P1′. Chymotrypsin hydrolyzes peptide bonds flanked with bulky hydrophobic amino acid residues. Particular residues include phenylalanine, tryptophan and tyrosine, which fit into a snug hydrophobic pocket. Trypsin hydrolyzes peptide bonds flanked with positively charged amino acid residues. Instead of having the hydrophobic pocket of the chymotrypsin, trypsin possesses an aspartic acid residue at the back of the pocket, which can interact with positively charged residues such as arginine and lysine. Elastase hydrolyzes peptide bonds flanked with small neutral amino acid residues, such as alanine, glycine and valine. In contrast to trypsin and chymotrypsin, elastase contains a pocket that is lined with valine and threonine, rendering it a mere depression, which can accommodate the smaller amino acid residues. Serine proteases are ubiquitous in prokaryotes and eukaryotes and serve important and diverse biological functions such as hemos psis, fibrinolysis, complement formation and the digestion of dietary proteins.

[0272] Elastases that belong to the serine protease family display extensive sequence homology to other known serine proteases, including trypsin and chymotrypsin. Serine elastases preferentially cleave polypeptides adjacent to aliphatic amino acids residues, typically alanine, valine and methionine, and to a lesser extent, leucine and isoleucine. Humans have six elastase genes which encode the structurally similar proteins, elastase 1 (ELA-1, also known as pancreatic elastase, PE,), elastase 2 (neutrophil elastase, NE, also known as PMN elastase, bone marrow serine protease, medullasin, human leukocyte elastase, HLE), elastase 2A (ELA-2A), elastase 2B (ELA-2B), elastase 3A (ELA-3A, elastase IIIA, Protease E), and elastase-3B (ELA-3B, elastase IIIB, protease E). Other serine proteases with elastase activity include, but are not limited to, proteinase-3 (PR-3), endogenous vascular elastase (EVE), and endothelial cell elastase (ECE).

[0273] Neutrophil primary azurophil granules carry NE (ELA-2) and PR-3, which are released upon neutrophil activation. NE is involved in degradation of the extracellular matrix and (ECM), including degradation of elastin, cartilage proteoglycans, collagens, and fibronectin, and digestion of material taken into the cell by phagocytosis. NE also helps in degradation of proteins, such as immunoglobulins and surfactant apoproteins. NE preferentially cleaves Val-X bonds and to a lesser extent Ala-X bonds. Abnormal or excessive release of NE has been linked to defects in connective tissue turnover, arthritis and inflammation. Like NE, PR-3 also functions to activate proenzymes, such as metalloproteinases, and cytokines, such as TNF-α, IL-1β, and interleukin-8 (IL-8).

[0274] Pancreatic elastase (ELA-1) preferentially cleaves Ala-X bonds and is expressed primarily in skin keratinocytes. Expression of ELA is not normally found in the adult pancreas though it is often expressed in and used as a marker for pancreatic cancers. Elastase activity of the normal pancreas is attributable to ELA-2A and ELA-2B. ELA-2A and ELA-2B preferentially cleaves Leu-X, Met-X and Phe-X bonds.

[0275] Some pathological conditions are believed to result at least in part from an imbalance between the elastases and their endogenous inhibitors. Uncontrolled proteolytic degradation by neutrophil elastases, especially ELA-2 has been implicated in a number of pathological conditions like pulmonary emphysema, acute respiratory distress syndrome, septic shock, multiple organ failure, rheumatoid arthritis and cystic fibrosis.

[0276] High concentrations of elastases can be found in the gastrointestinal tract and blood stream. Hence, effective therapeutics to be administered via these routes can be achieved through modification of elastase cleavage sites.

[0277] b. Matrix Metalloproteinases

[0278] Matrix metalloproteinases (MMPs) are a family of Zn²⁺- and calcium-dependent endopeptidases that degrade components of the extracellular matrix (ECM). In addition, MMPs also can process a number of cell-surface cytokines, receptors and other soluble proteins. They are involved in normal tissue remodeling processes such as wound healing, pregnancy and angiogenesis. Under physiological conditions, MMPs are made as inactive precursors (zymogens) and are processed to their active form. Additionally, the enzymes are specifically regulated by endogenous inhibitors called tissue inhibitors of matrix metalloproteinases (TIMPs). The proteolytic activity of MMPs acts as an effector mechanism of tissue remodeling in physiologic and pathologic conditions, and as modulator of inflammation. The excess synthesis and production of these proteins lead to accelerated degradation of the ECM which is associated with a variety of diseases and conditions such as, for example, bone homeostasis, arthritis, cancer, multiple sclerosis and rheumatoid arthritis. In the context of neuro inflammatory diseases, MMPs have been implicated in processes such as (a) blood-brain barrier (BBB) and blood-nerve barrier opening, (b) invasion of neural tissue by blood-derived immune cells, (c) shedding of cytokines and cytokine receptors, and (d) direct cellular damage in diseases of the peripheral and central nervous system (Leppert et al. Brain Res. Rev. 36(2-3): 249-57 (2001); Borkakoti et al. Prog. Biophys. Mol. Biol. 70(1): 73-94 (1998)).

[0279] Members of the MMP family include collagenases, gelatinases, stromelysins, matrilysin and membrane-bound MMPs. Most MMPs are secreted in the inactive proenzyme form. The secreted proenzyme MMPs can be activated by several proinflammatory agents such as oxidants, proteinases including elastase, plasmin, and trypsin, and other MMPs (Cuzner and Opdenakker. J. Neuroimmunol. 94(1-2): 1-14 (1999)). In tissues, physiological MMP activators include tissue or plasma proteinases or opportunistic bacterial proteinases. For example, the plasminogen activator/plasmin system, including ubiquitous plasminogen by urokinase (u-Pa) and tissue-type plasminogen activator (t-Pa), is an important activator of pro-MMP in pathological situations. MMP activity can be inhibited by tissue inhibitors of metalloproteinases (TIMPs), by serine proteinase inhibitors (serpins), and by nonspecific proteinase inhibitors, such as α2-macroglobulin. TIMPs inhibit the MMP activity through noncovalent binding of the active zinc-binding sites of MMPs. Proteolytic activities of MMPs and plasminogen activators, and their inhibitors, are important in maintaining the integrity of the ECM as cell-ECM interactions influence and mediate a wide range of processes including proliferation, differentiation, adhesion and migration of a variety of cell types. Excessive production of matrix metalloproteinases has been implicated in tissue damage and wound healing, inflammatory disorders, proliferative disorders and autoimmune diseases (St-Pierre et al. Curr. Drug Targets Inflamm. Allergy 2(3): 206-215 (2003); Opdenakker, G. Verh. K. Acad. Geneeskd. Belg. 59(6): 489-514 (1997)).

[0280] c. Increased Resistance to Proteolysis by Removal of Proteolytic Sites

[0281] Any method known to one of skill in the art, such as any described in Section D below, can be used to modify an EPO polypeptide for increased protease resistance. For example, as described in the Examples herein, the 2D-scanning methodology was used to identify the amino acid changes on EPO that lead to an increase in stability when challenged either with proteases (blood, intestinal, etc.), blood lysate or serum. The first step in the design of EPO mutants resistant to proteolysis includes identifying sites vulnerable to proteolysis along the protein sequence. Based on a list of selected blood, intestinal or any other type of proteases considered (Table 2), the complete list of all amino acids and sequences of amino acids in EPO that can be targeted by those proteases was first determined in silico. The protease targets (amino acids or sequences of amino acids along the EPO polypeptide) are named in silico HITs (is-HITs). Since protease mixtures in the body are quite complex in composition, it can be expected that the majority of the residues in a given protein sequence can be targeted for proteolysis.

[0282] The second step in the design of EPO mutants that are resistant to proteolysis includes identifying the appropriate replacing amino acids such that by replacement of the natural amino acids in EPO at is-HITs, the protein (i) becomes resistant to proteolysis; and (ii) elicits a level of activity at least comparable to the wild-type EPO polypeptide. The choice of the replacing amino acids must consider the broad target specificity of certain proteases and the need to preserve the physicochemical properties such as hydrophobicity, charge and polarity of essential (e.g., catalytic, binding, etc.) residues in EPO.

[0283] “Point Accepted Mutation” (PAM; Dayhoff et al., 1978) can be used as part of the 2D scanning approach. PAM values, originally developed to produce alignments between protein sequences, are available in the form of probability matrices that reflect an evolutionary distance between amino acids. Conservative substitutions of a residue in a reference sequence are those substitutions that are physically and functionally similar to the corresponding reference residues, i.e., that have a similar size, shape, electric charge, and/or chemical properties, including the ability to form covalent or hydrogen bonds and other such interactions. Conservative substitutions show the highest scores fitting with the PAM matrix criteria in the form of accepted point mutations. The PAM250 matrix is used in the frame of 2D-scanning to identify candidate replacing amino acids for the is-HITs in order to generate conservative mutations without affecting protein function. At least two amino acids with the highest values in PAM250 matrix corresponding to conservative substitutions or accepted point mutations were chosen for replacement at each is-HIT. The replacement of amino acids by cysteine residues is explicitly avoided since this change can lead to the formation of intermolecular disulfide bonds.

[0284] Briefly, using the algorithm PROTEOL (on-line at infobiogen.fr and at bioinfo.hku.hk/services/analyseq/cgi-bin/proteol_in.pl), a list of residues along the mature EPO polypeptide of 166 amino acids (SEQ ID NO: 2), which can be recognized as substrate for proteases (blood, intestinal, etc.) in Table 2 was established. The algorithm generates a proteolytic digestion map based on a list of proteases, the proteolytic specificity of the proteases, and the polypeptide amino acid sequence that is entered. Table 2 shows the in silico identification of amino acid positions that are targets for proteolysis using selected proteases and chemical treatment

TABLE 2

| | Amino Acid | Protease or Chemical |
|---|---|---|
| Abbreviation | Position | Treatment |
| AspN | D | Endoproteinase Asp-N |
| Chymo | (F, W, Y, M, L)~P | Chymotrypsin |
| Clos | R | Clostripain |
| CnBr | M | Cyanogen Bromide |
| IBzO | W | Iodosobenzoate |
| Myxo | K | Myxobacter |
| NH₂OH | N G | Hydroxylamine |
| pH2.5 | D P | pH 2.5 |
| ProEn | P | Proline Endopeptidase |
| Staph | E | Staphylococcal Protease |
| Tryp | (K, R)~P | Trypsin |
| TrypK | K~P | Trypsin (Arg blocked) |
| TrypR | R~P | Trypsin (Lys blocked) |

[0285] Is-HITS were identified and LEADS created for higher resistance to proteolysis of EPO. The native amino acids at each of the is-HIT positions and replacing amino acids for increased resistance to proteolysis can include, but are not limited to replacing any of Y, A, L, S, T, I, V, F, Q and M by any of E, D, K, R, N, Q, S and T. Is-HITS and LEADs can include modifications at regions susceptible to proteolysis.

[0286] d. Modified Epo Lead Polypeptides Exhibiting Increased Protease Resistance

[0287] The modified EPO polypeptides (also referred to herein as EPO variants) display increased protease resistance by virtue of one or more amino acid modifications in the primary sequence at sites that are normally susceptible to protease degradation. Typically, modifications include replacement (i.e., substitution), addition, deletion or a combination thereof, of amino acid residues as described herein. Modified Lead EPO polypeptides provided herein include those with 1, 2, 3, 4, 5, 6, 7, 8, 9, 10, 11, 12, 13, 14, 15, 16, 17, 18, 19, 20 or more modified positions. Any two or more LEAD modification can be combined to generate a Super-LEAD EPO polypeptide that has 2, 3, 4, 5, 6, 7, 8, 9, 10, 11, 12, 13, 14, 15, 16, 17, 18, 19, 20 or more individual LEAD mutations. Generally, the modification results in increased stability without losing at least one activity, such as erythropoietic or tissue protective activity (i.e., retains at least one activity as defined herein) of an unmodified EPO polypeptide. Any LEAD or Super-Lead polypeptide that render the polypeptide protease resistant can contain additional modifications to the EPO polypeptide so long as the polypeptide retains resistance to proteolyis compared to the LEAD or Super-LEAD polypeptide and retains one or more activities of the starting unmodified polypeptide.

[0288] Modified EPO polypeptides provided herein are modified at one or more amino acid positions corresponding to amino acid positions of a mature EPO polypeptide, for example, a mature EPO polypeptide having an amino acid sequence set forth in SEQ ID NO: 2 or 237. EPO polypeptides can be modified compared to a precursor or mature EPO polypeptide having an amino acid sequence set forth in SEQ ID NO: 1 or 2, respectively. EPO polypeptides can be modified compared to a precursor or mature EPO polypeptide in which the C-terminal arginine is removed, for example, having an amino acid sequence set forth in SEQ ID NO: 236 or 237, respectively. Hence, modified EPO polypeptides include those that, in their mature form, are 165 or 166 amino acids in length. Modified EPO polypeptides also include fragments of any EPO polypeptide, such as a fragment of an EPO polypeptide set forth in SEQ ID NO:2 or 237, so long as the EPO polypeptide retains activity. Depending on the method used for producting the EPO polypeptide, the modified EPO polypeptides include those that are heterogenous in length, contain post-translational modifications (e.g. glycosylation), or have an absence of post-translational modification (not glycosylated due to production in bacteria).

[0289] The EPO polypeptide can be of any human tissue or cell-type origin. Modified EPO polypeptides provided herein also include variants of EPO of non-human origin. Such alignments and selection of positions can be performed with any EPO polypeptide by aligning it with hEPO and selecting corresponding positions for modification. For example, modified EPO polypeptides can be variants of a non-human EPO, including, but not limited to, mouse, rat, guinea pig, cow, sheep, dog, cat, chicken, pig, rabbit, fish and chimpanzee EPO. Exemplary unmodified non-human EPO polypeptides have amino acid sequences set forth in SEQ ID NOS: 202-226. Modified EPO polypeptides also include polypeptides that are synthetic EPO polypeptides prepared recombinantly, or synthesized or constructed by other methods known in the art based upon known polypeptides.

[0290] Modification of EPO polypeptides to increase stability can be accomplished while keeping activity unchanged compared to the unmodified or wild-type polypeptide. Alternatively, modification of EPO stability can be accomplished while increasing activity compared to the unmodified or wild-type therapeutic polypeptide. Generally, modified EPO polypeptides retain one or more activities of an unmodified EPO polypeptide. For example, the modified EPO polypeptides provided herein exhibit at least one activity that is substantially unchanged (less than 1%, 5% or 10% changed) compared to the unmodified or wild-type EPO. In other examples, the activity of a modified EPO polypeptide is increased or is decreased as compared to an unmodified EPO polypeptide. Activity includes, for example, but are not limited to erythropoietic or tissue protective activity. Activity can be assessed in vitro or in vivo and can be compared to the unmodified EPO polypeptide, such as for example, the mature, wild-type native EPO polypeptide (SEQ ID NO: 2 or 237), the wild-type precursor EPO polypeptide (SEQ ID NO: 1), or any other EPO polypeptide known to one of skill in the art that is used as the starting material.

[0291] Other modifications of the modified EPO polypeptide can be included, such as, but not limited to, addition of carbohydrate, phosphate, sulfur, hydroxyl, carboxyl and polyethylene glycol (PEG) moieties. Thus, the modified EPO polypeptides provided herein can be further modified, for example, by glycosylation, phosphorylation, sulfation, hydroxylation, carboxylation and/or PEGylation. Such modifications can be effected in vivo or in vitro. Further, modified EPO polypeptides provided herein also include those that further contain naturally occurring human EPO (hEPO) variants, so long as the polypeptide exhibits increased resistance to proteolysis compared to an unmodified EPO polypeptide. Exemplary hEPO variants include, but are not limited to, variants that occur at amino acid positions C7, Y15, D43, Y49, G77, S120, Y145 of the mature hEPO polypeptide, wherein the amino acid modification is C7H, Y15F, D43N, Y49F, G77S, S120C, Y145F (see e.g., U.S. Pat. Nos. 4,703,008 and 7,041,794; SEQ ID NOS: 238-243). Any of the modified EPO polypeptide provided here can contain such modifications.

[0292] A modified EPO exhibiting increased protein stability containing a single amino acid change at an is-HIT position as compared to an unmodified EPO is called a LEAD. EPO polypeptide candidate LEAD polypeptides can include amino acid replacement or replacements at any one or more of the is-HIT positions selected using methods described herein or known in the art, such as obtained using PAM analysis as described above. Exemplary EPO LEAD polypeptides that exhibit increased protein stability, for example due to increased protease resistance, are described in related published U.S. application No. US 2005-0202438. Such exemplary amino acid modifications that can contribute to an increase in protein stability with respect to protease resistance are set forth in Table 3. In Table 3 below, the sequence identifier (SEQ ID NO) is in parenthesis next to each substitution. The positions of such mutations are described with reference to SEQ ID NOS: 2 and 237, but can be effected in any variant EPO polypeptide such as, but not limited to those set forth in SEQ ID NOS: 2, 237, 227, 228, 238-243, 309 and 310. Using methods described herein and in U.S. Patent Publication No. US 2005-0202438, the following is-HIT positions were identified to eliminate protease sensitive sites of EPO polypeptide: 2, 3, 4, 5, 7, 8, 10, 12, 13, 14, 15, 16, 17, 18, 20, 21, 23, 29, 31, 35, 37, 42, 43, 45, 48, 49, 51, 52, 53, 54, 55, 62, 64, 67, 69, 70, 72, 75, 76, 80, 81, 87, 88, 89, 90, 91, 93, 96, 97, 102, 103, 105, 108, 109, 110, 112, 116, 117, 121, 122, 123, 129, 130, 131, 136, 138, 139, 140, 141, 142, 143, 145, 148, 149, 150, 152, 153, 154, 155, 156, 159, 162, 165, and 166. The amino acid replacement or replacements can be at any one or more positions corresponding to any of the following positions: P2, P3, R4, L5, C7, D8, R10, L12, E13, R14, Y15, L16, L17, E18, K20, E21, E23, C29, E31, L35, E37, P42, D43, K45, F48, Y49, W51, K52, R53, M54, E55, E62, W64, L67, L69, L70, E72, L75, R76, L80, L81, P87, W88, E89, P90, L91, L93, D96, K97, L102, R103, L105, L108, L109, R110, L112, K116, E117, P121, P122, D123, P129, L130, R131, D136, F138, R139, K140, L141, F142, R143, Y145, F148, L149, R150, K152, L153, K154, L155, Y156, E159, R162, D165, and R166 of a mature EPO polypeptide set forth in SEQ ID NO: 2 or 237 or at a corresponding position in an allelic or species variant or other variant of a mature EPO polypeptide set forth in SEQ ID NO:2 or 237, an EPO polypeptide having at least or at least about 60%, 70%, 75%, 80%, 85%, 90%, 91%, 92%, 93%, 94%, 95%, 96%, 97%, 98%, 99%, or more sequence identity to a mature EPO polypeptide set forth in SEQ ID NO: 2 or 237.

[0293] In one embodiment, positions are typically replaced as follows: replacement of D with N or Q, replacement of E with H, Q or N, replacement of F with I or V, replacement of K with Q or N, replacement of L with I or V, replacement of M with I or V, replacement of N with Q or S, replacement of P with A or S, replacement of R with H or Q, replacement of W with H or S, replacement of Y with I or H, replacement of A, G, I, S, T, or V with Q, H, or N.

[0294] In one embodiment, positions corresponding to EPO are selected (is-HITS) and amino acid replacements are made (LEADs) with increased resistance to proteolysis that include, but are not limited to replacements corresponding to those set forth in Table 3 where the replacements correspond to the sequence of amino acids set forth in SEQ ID NO: 2 or SEQ ID NO:237. Table 3 provides non-limiting examples of amino acid replacements corresponding to amino acid positions of a mature EPO polypeptide, that increase resistance to proteolysis and, thereby, protein stability.

[0295] In reference to such mutants, the first amino acid (one-letter abbreviation) corresponds to the amino acid that is replaced, the number corresponds to position in the EPO polypeptide sequence with reference to SEQ ID NO: 2 or 237, and the second amino acid (one-letter abbreviation) corresponds to the amino acid selected that replaces the first amino acid at that position. In Table 3, the sequence identifier (SEQ ID NO.) is in parenthesis next to each substitution. The EPO polypeptides employed for modification can be any EPO polypeptide, including other mammalian EPO polypeptides. Corresponding positions, as assessed by appropriate alignment, are identified and modified as described herein.

TABLE 3
List of EPO Modifications to Increase Resistance to Proteolysis

| | | | | | | |
|---|---|---|---|---|---|---|
| P2S (3) | P2A (4) | P3S (5) | P3A (6) | R4H (7) | R4Q (8) | C7S (9) |
| C7V (10) | D8Q (11) | D8H (12) | R10H (13) | R10Q (14) | L12V (15) | L12I (16) |
| E18Q (17) | E18H (18) | K20Q (19) | K20T (20) | E21Q (21) | E21H (22) | E23Q (23) |
| E23H (24) | C29S (25) | C29V (26) | E31Q (27) | E31H (28) | L35V (29) | L35I (30) |
| E37Q (31) | E37H (32) | P42S (33) | P42A (34) | D43Q (35) | D43H (36) | K45Q (37) |
| K45T (38) | F48I (39) | F48V (40) | Y49H (41) | Y49I (42) | W51S (43) | W51H (44) |
| K52Q (45) | K52T (46) | R53H (47) | R53Q (48) | M54V (49) | M54I (50) | E55Q (51) |
| E55H (52) | E62Q (53) | E62H (54) | W64S (55) | W64H (56) | L69V (57) | L69I (58) |
| E72Q (59) | E72H (60) | L75V (61) | L75I (62) | R76H (63) | R76Q (64) | L80V (65) |
| L80I (66) | P87S (67) | P87A (68) | W88S (69) | W88H (70) | E89Q (71) | E89H (72) |
| P90S (73) | P90A (74) | L93V (75) | L93I (76) | D96Q (77) | D96H (78) | K97Q (79) |
| K97T (80) | L102V (81) | L102I (82) | R110H (83) | R110Q (84) | L112V (85) | L112I (86) |
| K116Q (87) | K116T (88) | P121S (89) | P121A (90) | P122S (91) | P122A (92) | D123Q (93) |
| D123H (94) | P129S (95) | P129A (96) | L130V (97) | L130I (98) | R131H (99) | R131Q (100) |
| D136Q (101) | D136H (102) | R143H (103) | R143Q (104) | Y145H (105) | Y145I (106) | R150H (107) |
| R150Q (108) | K152Q (109) | K152T (110) | K154Q (111) | K154T (112) | L155V (113) | L155I (114) |
| E159Q (115) | E159H (116) | R162H (117) | R162Q (118) | C29A (119) | C29I (120) | C29T (121) |
| C7A (122) | C7I (123) | C7T (124) | D123N (125) | D136N (126) | D43N (127) | D96N (128) |
| E159N (129) | E18N (130) | E21N (131) | E23N (132) | E31N (133) | E37N (134) | E55N (135) |
| E62N (136) | E72N (137) | E89N (138) | K116N (139) | K152N (140) | K154N (141) | K20N (142) |
| K45N (143) | K52N (144) | K97N (145) | D8N (146) | D165Q (147) | D165H (148) | D165N (149) |
| R166H (150) | R166Q (151) | L5I (152) | L5V (153) | E13Q (154) | E13H (155) | E13N (156) |
| R14H (157) | R14Q (158) | Y15H (159) | Y15I (160) | L16I (161) | L16V (162) | L17I (163) |
| L17V (164) | L67I (165) | L67V (166) | L70I (167) | L70V (168) | L81I (169) | L81V (170) |
| L91I (171) | L91V (172) | R103H (173) | R103Q (174) | L105I (175) | L105V (176) | L108I (177) |
| L108V (178) | L109I (179) | L109V (180) | E117Q (181) | E117H (182) | E117N (183) | F138I (184) |
| F138V (185) | R139H (186) | R139Q (187) | K140N (188) | K140Q (189) | L141I (190) | L141V (191) |
| F142I (192) | F142V (193) | F148I (194) | F148V (195) | L149I (196) | L149V (197) | L153I (198) |
| L153V (199) | Y156H (200) | Y156I (201) | | | | |

[0296] Candidate LEAD EPO polypeptides designed to exhibit increased protease resistance can contain an amino acid modifications corresponding to any one or more modifications of P2S (i.e., replacement of P by S at a position corresponding to amino acid position 2 of mature human EPO (e.g., SEQ ID NO: 2 or 237)), P2A, P3S, P3A, R4H, R4Q, L51, L5V, C7S, C7V, C7A, C7I, C7T, D8Q, D8H, D8N, R10H, R10Q, L12V, L12I, E13Q, E13H, E13N, R14H, R14Q, Y15H, Y151, L16I, L16V, L17I, L17V, E18Q, E18H, E18N, K20Q, K20T, K20N, E21Q, E21H, E21N, E23Q, E23H, E23N, C29S, C29V, C29A, C29I, C29T, E31Q, E31H, E31N, L35V, L35I, E37Q, E37H, E37N, P42S, P42A, D43Q, D43H, D43N, K45Q, K45T, K45N, F48I, F48V, Y49H, Y49I, W51S, W51H, K52Q, K52T, K52N, R53H, R53Q, M54V, M54I, E55Q, E55H, E55N, E62Q, E62H, E62N, W64S, W64H, L67I, L67V, L69V, L69I, L701, L70V, E72Q, E72H, E72N, L75V, L75I, R76H, R76Q, L80V, L80I, L81 I, L81V, P87S, P87A, W88S, W88H, E89Q, E89H, E89N, P90S, P90A, L91I, L91V, L93V, L93I, D96Q, D96H, D96N, K97Q, K97T, K97N, L102V, L102I, R103H, R103Q, L105I, L105V, L108I, L108V, L109I, L109V, R110H, R110Q, L112V, L112I, K116Q, K116T, K116N, E117Q, E117H, E117N, P121S, P121A, P122S, P122A, D123Q, D123H, D123N, P129S, P129A, L130V, L130I, R131H, R131Q, D136Q, D136H, D136N, F138I, F138V, R139H, R139Q, K140N, K140Q, L141I, L141V, F142I, F142V, R143H, R143Q, Y145H, Y145I, F148I, F148V, L1491, L149V, R150H, R150Q, K152Q, K152T, K152N, L153I, L153V, K154Q, K154T, K154N, L155V, L155I, Y156H, Y156I, E159Q, E159H, E159N, R162H, R162Q, D165Q, D165H, D165N, R166H, and R166Q.

[0297] In particular, modified EPO polypeptides having increased protease resistance can contain an amino acid modifications corresponding to any one or more modifications R4H; K20Q; F48I; K52Q; L80I; P90S; L93V; L93I; D96Q; K116T; L130I; R131H; R131Q; R143H; R143Q; R150H; D123N; D136N; E159N; K116N; K45N; K52N; D165Q; D165H; D165N; R166H; L16I; L16V; R139H; R139Q; and L153V, in particular R4H; K20Q; F48I; K52Q; L80I; L93V; L93I; K116T; L130I; R131H; R143H; R143Q; R150H; D123N; E159N; K116N; K45N; K52N; D165H; D165N; L16I; R139H; R139Q; and L153V.

[0298] Any of the above modifications can be in an unmodified EPO polypeptide, such as an EPO having a sequence of amino acids set forth in SEQ ID NO: 2 or 237, or in allelic or species variant or other variant of a mature human EPO polypeptide having at least or at least about 60%, 70%, 75%, 80%, 85%, 90%, 91%, 92%, 93%, 94%, 95%, 96%, 97%, 98%, 99%, or more sequence identity to a mature human EPO polypeptide set forth in SEQ ID NO: 2 or 237. Exemplary modified EPO LEAD candidate polypeptides are set forth in any one of SEQ ID NOS: 3-201, and include those having 166 amino acids as well as those having 165 amino acids and lacking the C-terminal arginine.

[0299] Such modified LEAD polypeptides can be administered by any route, including but not limited to orally, systemically, buccally, transdermally, intravenously, intramuscularly and subcutaneously. For example, a modified EPO polypeptide containing one or more modification rendering the polypeptide protease resistance is administered subcutaneously. The lower susceptibility of the polypeptide to proteolytic degradation makes it longer-lasting in the serum. The polypeptide can be administered in fully glycosylated form, as a partially glycosylated form, or as a de-glycosylated polypeptide. As discussed below, it is contemplated that a polypeptide that exhibits increased resistance to proteolysis can compensate for a lack of glycosylation of the polypeptide, thereby exhibiting increased half-life compared to a polypeptide not containing the modification that also is not glycosylated (i.e. is partially glycosylated or de-glycosylated). Typically, however, a modified EPO polypeptide administered subcutaneously is produced to confer glycosylation of the polypeptide, e.g. using mammalian expressions systems or other expression systems that render the polypeptide glycosylated.

[0300] Additionally, a modified EPO polypeptide as set forth above can contain a further modification compared to an unmodified EPO polypeptide. Generally, the resulting modified EPO polypeptide retains one or more activities of the unmodified EPO polypeptide.

[0301] 2. Super-LEADS

[0302] Provided herein are SuperLEAD polypeptides containing two or more of the modifications of the individual LEAD polypeptides set forth in Table 3 or as described in related published U.S. application No. 2005-0202438. The modified SuperLEAD EPO polypeptides include those with 2, 3, 4, 5, 6, 7, 8, 9, 10, 11, 12, 13, 14, 15, 16, 17, 18, 19, 20 or more modified positions. The resulting modified polypeptides contain two or more of the LEAD modifications, e.g., two or more modifications that modify resistance to proteases (blood, intestinal, etc.). The EPO polypeptide can further contain additional modifications so long as the polypeptide exhibits protease resistance compared to an unmodified EPO polypeptide.

[0303] SuperLEADs provided herein contain two or more of the individual LEAD modifications as set forth above. Hence, modified EPO super-LEAD polypeptides are a combination of single amino acid mutations present in two or more of the respective modified EPO LEAD polypeptides. Thus, modified EPO super-LEAD polypeptides have two or more of the single amino acid replacements derived from two or more of the respective modified EPO LEAD polypeptides. As described above and in detail below, modified EPO polypeptides provided herein exhibit increased protein stability manifested as an increased resistance to proteolysis. Typically, modified EPO LEAD polypeptides created are those whose performance has been optimized with respect to the unmodified polypeptide by modification of a single amino acid replacement at one is-HIT position. Modified EPO super-LEAD polypeptides are created such that the polypeptide contains two or more EPO LEAD modifications, each at a different is-HIT position. Modifications that increase proteolysis resistance can be added to other modifications provided herein or known in the art to increase proteolysis resistance. Modifications that increase protease resistance also can be added to modifications to EPO that alter other functionalities including activity, modifications that affect post-translation protein modifications and any other known modifications in the art.

[0304] Once the modified LEAD polypeptides have been identified using, for example, 2D-scanning methods, super-LEADs can be generated by combining two or more individual LEADs using methods well known in the art, such as recombination, mutagenesis and DNA shuffling, and by methods such as additive directional mutagenesis, 3D-scanning, and multi-overlapped primer extensions, as provided above.

[0305] Exemplary modified EPO super-LEAD polypeptides exhibiting increased protein stability can include EPO polypeptides containing two or more amino acid modifications as compared to an unmodified EPO polypeptide. In some examples, an EPO polypeptide can contain 2, 3, 4, 5, 6, 7, 8, 9, 10, 11, 12, 13, 14, 15, 16, 17, 18, 19, 20 or more modified positions. Generally, the resulting EPO polypeptide exhibits increased protein stability as manifested by increase protease resistance and retains at least one activity of an unmodified EPO polypeptide. A modified EPO polypeptide can include any two or more amino acid modifications set forth in Table 3 above. For example, the modified EPO polypeptide can contain two or more amino acid modifications corresponding to any two or more modifications selected from among P2S, P2A, P3S, P3A, R4H, R4Q, L5I, L5V, C7S, C7V, C7A, C7I, C7T, D8Q, D8H, D8N, R10H, R10Q, L12V, L12I, E13Q, E13H, E13N, R14H, R14Q, Y15H, Y151, L16I, L16V, L17I, L17V, E18Q, E18H, E18N, K20Q, K20T, K20N, E21Q, E21H, E21N, E23Q, E23H, E23N, C29S, C29V, C29A, C291, C29T, E31Q, E31H, E31N, L35V, L35I, E37Q, E37H, E37N, P42S, P42A, D43Q, D43H, D43N, K45Q, K45T, K45N, F48I, F48V, Y49H, Y49I, W51S, W51H, K52Q, K52T, K52N, R53H, R53Q, M54V, M54I, E55Q, E55H, E55N, E62Q, E62H, E62N, W64S, W64H, L67I, L67V, L69V, L69I, L70I, L70V, E72Q, E72H, E72N, L75V, L75I, R76H, R76Q, L80V, L80I, L81I, L81V, P87S, P87A, W88S, W88H, E89Q, E89H, E89N, P90S, P90A, L91I, L91V, L93V, L93I, D96Q, D96H, D96N, K97Q, K97T, K97N, L102V, L102I, R103H, R103Q, L105I, L105V, L108I, L108V, L109I, L109V, R110H, R110Q, L112V, L112I, K116Q, K116T, K116N, E117Q, E117H, E117N, P121S, P121A, P122S, P122A, D123Q, D123H, D123N, P129S, P129A, L130V, L130I, R131H, R131Q, D136Q, D136H, D136N, F138I, F138V, R139H, R139Q, K140N, K140Q, L141I, L141V, F142I, F142V, R143H, R143Q, Y145H, Y145I, F148I, F148V, L149I, L149V, R150H, R150Q, K152Q, K152T, K152N, L153I, L153V, K154Q, K154T, K154N, L155V, L155I, Y156H, Y156I, E159Q, E159H, E159N, R162H, R162Q, D165Q, D165H, D165N, R166H, and R166Q of a mature EPO polypeptide set forth in SEQ ID NO: 2 or 237.

[0306] Exemplary of a modified EPO Super-LEAD polypeptides having increased protease resistance is any containing two or more amino acid modifications corresponding to any of positions 4, 16, 20, 45, 48, 52, 80, 90, 93, 96, 116, 123, 131, 136, 139 143, 150, 159, 165 and 166. Replacements include, but are not limited to, any two or more modifications of R4H; K20Q; F48I; K52Q; L80I; P90S; L93V; L93I; D96Q; K116T; L130I; R131H; R131Q; R143H; R143Q; R150H; D123N; D136N; E159N; K116N; K45N; K52N; D165Q; D165H; D165N; R166H; L16I; L16V; R139H; R139Q; and L153V, in particular two or more amino acid modifications of R4H; K20Q; F48I; K52Q; L80I; L93V; L93I; K116T; L130I; R131H; R143H; R143Q; R150H; D123N; E159N; K116N; K45N; K52N; D165H; D165N; L16I; R139H; R139Q; and L153V, in particular R4H and R139H.

[0307] In one example, exemplary modified EPO Super-LEAD polypeptides provided herein contain a modification at position R4, for example, R4H or R4Q, and a modification corresponding to one or more additional LEAD polypeptide designed to exhibit increase protease resistance, such as set forth in Table 3 above. For example, exemplary of additional LEAD modifications include, but are not limited to, replacement of an is-HIT position corresponding to any of positions 16, 20, 45, 48, 52, 80, 90, 93, 96, 116, 123, 130, 131, 136, 139, 143, 150, 153, 159, 165 and 166. Exemplary replacing amino acids include, but are not limited to, L16I, L16V, K20Q, K45N, F48I, K52N, K52Q, L80I, P90S, L93I, D96Q, K116L, K116T, D123N, L130I, R131Q, D136N, R139H, R139Q R143Q, R143H, R150H, L153V, E159N, D15Q, D165H, D165N and R166H.

[0308] A Super-Lead can include any combination of a modification at R4 and another LEAD modification. For example, Super-LEAD provided herein can contain a modification at position R4 (e.g. R4H or R4Q) and one additional LEAD modification; or a modification at position R4 (e.g. R4H or R4Q) and two additional LEAD modifications; or a modification at position R4 (e.g. R4H or R4Q) and three additional LEAD modifications. Generally the modification at position R4 and the one or more further LEAD modifications are modifications that confer protease resistance to the polypeptide. Further modifications can also be included in an EPO Super-LEAD polypeptide, such as any described herein below in Section 3, so long as the EPO Super-LEAD polypeptide exhibits increased protease resistance compared to an unmodified EPO polypeptide. Exemplary Super-LEAD EPO polypeptides provided herein contain at least one modification that is R4H.

[0309] Hence, exemplary modified EPO Super-LEAD polypeptides provided herein that contain more than one modification, include, but are not limited to R4H/R150H; R4H/R143Q; R4H/E159N; R4H/R139H; R4H/R139Q; R4H/L93I; R4H/D96Q; R4H/L130I; R4H/L153V; R4H/K20Q; R4H/F48I; R4H/R131Q; R4H/K45N; R4H/K52N; R4H/K52Q; R4H/L80I; R4H/K116T; R4H/D123N; R4H/D136N; R4H/P90S; R4H/D165Q; R4H/D165H; R4H/D165N; R4H/K116N; R4H/R143H; R4H/R166H; R4H/L16I; R4H/L16V; R4H/L93I/R143Q; R4H/L93I/R150H; R4H/R143Q/R150H and R4H/L93I/E159N. Such polypeptides are set forth in any of SEQ ID NOS: 311-342. The EPO polypeptides include those that are 166 amino acids in length, and also include those set forth in any of SEQ ID NOS:311-342 that are active fragments thereof so long as the active fragments contain the modification. For example, EPO polypeptides include those that are 165 amino acids in length and that lack the C-terminal arginine in any of SEQ ID NOS: 311-342.

[0310] Any of the above modifications can be in an unmodified EPO polypeptide, such as an EPO having a sequence of amino acids set forth in SEQ ID NO: 2 or 237, or in allelic or species variant or other variant of a mature human EPO polypeptide having at least or at least about 60%, 70%, 75%, 80%, 85%, 90%, 91%, 92%, 93%, 94%, 95%, 96%, 97%, 98%, 99%, or more sequence identity to a mature human EPO polypeptide set forth in SEQ ID NO: 2 or 237. Exemplary modified EPO LEAD candidate polypeptides are set forth in any one of SEQ ID NOS: 3-201, and include those having 166 amino acids as well as those having 165 amino acids and lacking the C-terminal arginine.

[0311] Such modified LEAD polypeptides can be administered by any route, including but not limited to orally, systemically, buccally, transdermally, intravenously, intramuscularly and subcutaneously. Generally, it is contemplated that a modified EPO polypeptide containing one or more modification rendering the polypeptide protease resistance is administered subcutaneously. The lower susceptibility of the polypeptide to proteolytic degradation makes it longer-lasting in the serum. The polypeptide can be administered in fully glycosylated form, as a partially glycosylated form, or as a de-glycosylated polypeptide. As discussed below, it is contemplated that even with subcutaneous administration, a polypeptide that exhibits increased resistance to proteolysis can compensate for a lack of glycosylation of the polypeptide, thereby exhibiting increased half-life compared to the absence of the modification. Typically, however, a modified EPO polypeptide administered subcutaneously is produced to confer glycosylation of the polypeptide, e.g. using mammalian expressions systems or other expression systems that render the polypeptide glycosylated.

[0312] Additionally, a modified EPO polypeptide as set forth above can contain a further modification compared to an unmodified EPO polypeptide. Generally, the resulting modified EPO polypeptide retains one or more activities of the unmodified EPO polypeptide.

[0313] 3. Other EPO Modifications

[0314] In addition to any one or more amino acid modifications provided herein, a modified EPO polypeptide also can contain one or more additional modifications, including those known to those of skill in the art, including, but not limited to, PEGylation, hyperglycosylation, deimmunization, and others (see e.g., U.S. Pat. Nos. 5,856,298; U.S. Patent Publication Nos. 2003-0120045, 2004-0063917, 2005-0220800, 2005-0107591, 2006-0035322, and 2006-0073563; and International PCT Publication No.: WO 01/81405). Generally, the modification results in increased stability without losing at least one activity, such as erythropoietic or tissue protective activity (i.e., retains at least one activity as defined herein) of an unmodified EPO polypeptide. For example, other further modifications in an EPO polypeptide include one or more additional amino acid modifications and/or one or more chemical modifications. Such modifications include, but are not limited to, those that alter the immunogenicity, glycosylation, activity, or any other known property of an EPO polypeptide. In another example, chemical modifications include post-translational modifications of a protein, such as for example, glycosylation by a carbohydrate moiety, acylation (e.g., acetylation or succinylation), methylation, phosphorylation, hasylation, carbamylation, sulfation, prenylation, oxidation, guanidination, amidination, carbamylation (i.e., carbamoylation), trinitrophenylation, nitration, PEGylation, or a combination thereof. In addition, protein modifications also can include modification to facilitate the detection, purification and assay development of a polypeptide, such as for example, modification of a polypeptide with a Sulfo-NHS-LC-biotin for covalent attachment to a primary amine on a protein, or other similar modification for florescent, non-isotopic or radioactive labels. Exemplary further modifications in an EPO polypeptide are described below. Modified polypeptides that are conjugates and/or labeled also are provided. For example, provided herein are modified polypeptides that are conjugated to a PEG moiety or contain a carbohydrate moiety covalently linked to one or more glycosylation sites on the polypeptide.

[0315] In another embodiment, other known properties of an EPO polypeptide can be modified in addition to any one or more amino acid modifications provided herein. Such modifications include, but are not limited to, alteration of the erythropoietic or tissue protective activity of an EPO polypeptide. Resulting modified EPO polypeptides can be tested for one or more parameters to assess polypeptide properties, such as protein stability (e.g., increased resistance to proteases), or polypeptide activities, such as erythropoietic or tissue protective activity, using any of the assays described herein.

[0316] a. Immunogenicity

[0317] There are many instances where the efficacy of a therapeutic protein is limited by an unwanted immune reaction to the therapeutic protein. An immune response to a therapeutic protein, such as EPO, proceeds via the MHC class II peptide presentation pathway. Here, exogenous proteins are engulfed and processed for presentation in association with MHC class II molecules of the DR, DQ or DP type. MHC class II molecules are expressed by professional antigen presenting cells (APCs), such as macrophages and dendritic cells, amongst others. Engagement of a MHC class II peptide complex by a cognate T-cell receptor on the surface of the T cell, together with the cross binding of certain other co-receptors, such as the CD4 molecule, can induce an activated state within the T cell. Activation leads to the release of cytokines, further activating other lymphocytes such as B cells to produce antibodies or activating T killer cells as a full cellular immune response.

[0318] The ability of a peptide (T cell epitope) to bind a given MHC class II molecule for presentation on the surface of an APC is dependent on a number of factors, most notably its primary sequence. This will influence its propensity for proteolytic cleavage and also its affinity for binding within the peptide binding cleft of the MHC class II molecule. The MHC class II/peptide complex on the APC surface presents a binding face to a particular T cell receptor (TCR) able to recognize determinants provided by exposed residues of the peptide and the MHC class II molecule.

[0319] Formation of inhibitory antibodies to therapeutic EPO polypeptides is known in the art (see e.g., Casadevall et al. (2002)N. Engl. J. Med. 346: 469-475; Macdougall (2004)Curr. Med. Res. Opin. 20: 83-86; Verhelst et al. (2004)Lancet 363: 1768-1771; Locatelli and Del Vecchio (2003) J. Nephrol. 16: 461-466). Hence, the combination modified EPO polypeptides provided herein with modifications to decrease overall immunogenicity of the modified EPO polypeptides can improve the therapeutic properties of the EPO polypeptide. The identification of T cell epitopes can be carried out according to methods known in the art (see e.g., U.S. Patent Publication Nos. 2004-0063917, 2005-0220800, 2006-0035322, and 2006-0073563) and can be used to identify the binding propensity of EPO peptides to an MHC class II molecule.

[0320] Further modifications to a modified EPO polypeptide provided herein can include modifications of at least one amino acid residue resulting in a substantial reduction in activity of or elimination of one or more T cell epitopes from the protein, i.e., deimmunization of the polypeptide. One or more amino acid modifications at particular positions within any of the MHC class II ligands can result in a deimmunized EPO polypeptide with a reduced immunogenicity when administered as a therapeutic to a host, such as for example, a human host.

[0321] Exemplary amino acid positions for modification of a T cell epitope, and thereby a deimmunized EPO polypeptide with a reduced immunogenic potential, include amino acid modifications at one or more positions corresponding to any of the following positions: R4, L5, I6, D8, S9, R10, V11, L12, E13, R14, Y15, L16, L17, E18, A19, K20, E21, A22, E23, N24, I125, T27, G28, A30, C33, L35, N38, I39, T40, V41, D43, V46, F48, Y49, W51, K52, R53, M54A, M54C, M54D, M54E, M54G, M54, E55, V56, G57, Q58, Q59, A60, V61, E62, V63, W64, Q65, G66, L67, A68, L69P, L70, S71, E72, A73Q, A73, V74, L75, R76, G77, A79, L80, L81, V82, W88, E89, L91, Q92, L93, H94, V95, D96, K97, A98, V99, S100, G101, L102, R103, S104, L105, T107, L108, L109, R110, L112, G113, A114, Q115, K116, E117, A118, A118K, 1119, S120, A124, A125, A127, L130, I133, A135, D136, F138, R139, K140, L141, F142, R143, V144, Y145, S146, N147, F148, L149, R150, G151, K152, L153E, K154, L155, Y156, T157, G158, E159, A160, C161, R162, T163 and G164 of a mature EPO polypeptide set forth in SEQ ID NO: 2 or 237.

[0322] Exemplary amino acid substitution for modification of a T cell epitope, and thereby a deimmunized EPO polypeptide with a reduced immunogenic potential, include amino acid modifications including: R4A, R4C, R4G, R4P, L5A, L5C, L5D, L5E, L5G, L5H, L5K, L5N, L5P, L5Q, L5R, L5S, L5T, I6A, I6C, I6D, I6E, I6G, I6H, I6K, I6N, I6P, I6Q, I6R, I6S, I6T, I6M, I6W, D8A, D8C, D8G, D8P, S9P, S9T, R10A, R10C, R10G, R10P, V11A, V11C, V11D, V11E, V11G, V11H, V11K, V11N, V11P, V11Q, V11R, V11S, V11T, V11F, V11I, V11M, V11W, V11Y, L12A, L12C, L12D, L12E, L12G, L12H, L12K, L12N, L12P, L12Q, L12, L12S, L12T, L12F, L12I, L12M, L12V, L12W, L12Y, E13A, E13C, E13G, E13P, R14A, R14C, R14G, R14H, R14P, R14T, Y15A, Y15C, Y15D, Y15E, Y15G, Y15H, Y15K, Y15N, Y15P, Y15Q, Y15R, Y15S, Y15T, L16A, L16C, L16D, L16E, L16G, L16H, L16K, L16N, L16P, L16Q, L16R, L16S, L16T, L16W, L16Y, L17A, L17C, L17D, L17E, L17G, L17H, L17K, L17N, L17P, L17Q, L17, L17S, L17T, L17F, L17I, L17M, L17V, L17W, L17Y, E18A, E18C, E18G, E18P, E18T, A19H, A19P, A19T, K20H, K20P, K20T, E21A, E21C, E21G, E21P, A22C, A22D, A22E, A22G, A22H, A22K, A22N, A22P, A22Q, A22R, A22S, A22T, E23P, E23T, N24A, N24C, N24G, N24P, I25A, I25C, I25D, I25E, I25G, I25H, I25K, I25N, I25P, I25Q, I25R, I25S, I25T, T27A, T27C, T27G, T27P, G28H, G28T, A30D, A30H, A30P, C33H, C33T, L35A, L35C, L35D, L35E, L35G, L35H, L35K, L35N, L35P, L35Q, L35R, L35S, L35T, L35M, L35W, L35Y, N38T, I39A, I39C, I39D, I39E, I39G, I39H, I39K, I39N, I39P, I39Q, I39R, I39S, I39T, T40D, T40H, V41A, V41C, V41D, V41E, V41G, V41H, V41K, V41N, V41P, V41Q, V41R, V41S, V41T, V41I, V41Y, D43T, V46A, V46C, V46D, V46E, V46G, V46H, V46K, V46N, V46P, V46Q, V46R, V46S, V46T, V46M, V46W, V46Y, F48A, F48C, F48D, F48E, F48G, F48H, F48K, F48N, F48P, F48Q, F48R, F48S, F48T, F48M, F48W, Y49A, Y49C, Y49D, Y49E, Y49G, Y49H, Y49K, Y49N, Y49P, Y49Q, Y49R, Y49S, Y49T, Y49M, Y49W, W51A, W51C, W51D, W51E, W51G, W51H, W51K, W51N, W51P, W51Q, W51R, W51S, W51T, K52A, K52C, K52G, K52H, K52P, K52T, K52E, K52D, R53A, R53C, R53G, R53H, R53P, R53Q, R53N, R53H, R53S, R53E, R53A, R53D, M54A, M54C, M54D, M54E, M54G, M54H, M54K, M54N, M54P, M54Q, M54R, M54S, M54T, M54F, M54I, M54L, M54V, M54W, M54Y, E55A, E55C, E55G, E55P, E55T, V56, V56A, V56C, V56D, V56E, V56G, V56H, V56K, V56N, V56P, V56Q, V56R, V56S, V56T, V56F, V56I, V56L, V56W, V56Y, G57C, G57D, G57E, G57H, G57K, G57N, G57P, G57Q, G57R, G57S, G57T, Q58A, Q58C, Q58G, Q58P, Q59A, Q59C, Q59G, Q59H, Q59P, Q59T, Q59K, Q59R, Q59M, Q59W, Q59L, Q59Y, Q59F, Q59N, Q59E, Q59I, Q59A, A60C, A60D, A60E, A60G, A60H, A60K, A60N, A60P, A60Q, A60R, A60S, A60T, V61A, V61C, V61D, V61E, V61G, V61H, V61K, V61N, V61P, V61Q, V61R, V61S, V61T, V61W, E62H, E62P, E62S, E62T, V63A, V63C, V63D, V63E, V63G, V63H, V63K, V63N, V63P, V63Q, V63R, V63S, V63T, V63F, V63I, V63M, V63W, V63Y, W64A, W64C, W64D, W64E, W64G, W64H, W64K, W64N, W64P, W64Q, W64R, W64S, W64T, Q65A, Q65C, Q65G, Q65P, G66D, G66E, G66H, G66K, G66N, G66P, G66Q, G66R, G66S, G66T, L67A, L67C, L67D, L67E, L67G, L67H, L67K, L67N, L67P, L67Q, L67R, L67S, L67T, L67F, L67I, L67H, L67V, L67W, L67Y, A68C, A68D, A68E, A68G, A68H, A68K, A68N, A68P, A68Q, A68R, A68S, A68T, L69A, L69C, L69D, L69E, L69G, L69H, L69K, L69N, L69P, L69Q, L69R, L69S, L69T, L69F, L69I, L69M, L69W, L69Y, L70A, L70C, L70D, L70E, L70G, L70H, L70K, L70N, L70P, L70Q, L70R, L70S, L70T, L70Y, S71A, S71C, S71G, S71H, S71P, S71T, E72H, E72P, E72T, A73E, A73H, A73P, A73Q, A73T, V74A, V74C, V74D, V74E, V74G, V74H, V74K, V74N, V74P, V74Q, V74R, V74S, V74T, V74F, V74I, V74W, V74Y, L75A, L75C, L75D, L75E, L75G, L75H, L75K, L75N, L75P, L75Q, L75R, L75S, L75T, L75F, L75I, L75V, L75W, L75Y, R76A, R76C, R76G, R76P, G77H, G77P, G77T, A79H, A79P, L80A, L80C, L80D, L80E, L800, L80H, L80K, L80N, L80P, L80Q, L80R, L80S, L80T, L80F, L80I, L80Y, L81A, L81C, L81D, L81E, L81G, L81H, L81K, L81N, L81P, L81Q, L81R, L81S, L81T, V82A, V82C, V82D, V82E, V82G, V82H, V82K, V82N, V82P, V82Q, V82R, V82S, V82T, W88A, W88C, W88D, W88E, W88G, W88H, W88K, W88N, W88P, W88Q, W88R, W88S, W88T, E89A, E89C, E89G, E89P, L91A, L91C, L91D, L91E, L91G, L91H, L91K, L91N, L91P, L91Q, L91R, L91S, L91T, L91F, L91 I, L91M, L91V, L91W, L91Y, Q92A, Q92C, Q92G, Q92P, L93A, L93C, L93D, L93E, L93G, L93H, L93K, L93N, L93P, L93Q, L93R, L93S, L93T, L93M, L93W, L93Y, H94P, H94T, V95A, V95C, V95D, V95E, V95G, V95H, V95K, V95N, V95P, V95Q, V95R, V95S, V95T, V95F, V95I, V95M, V95W, V95Y, D96A, D96C, D96G, D96H, D96P, D96T, K97A, K97C, K97G, K97P, A98C, A98D, A98E, A98H, A98K, A98N, A98P, A98Q, A98R, A98S, A98T, V99A, V99C, V99D, V99E, V99G, V99H, V99K, V99N, V99P, V99Q, V99R, V99S, V99T, V99W, V99Y, S100D, S100H, S100N, S100P, S100Q, G101D, G101E, G101H, G101K, G101N, G101P, G101Q, G101R, G101S, G101T, L102A, L102C, L102D, L102E, L102G, L102H, L102K, L102N, L102P, L102Q, L102R, L102S, L102T, L102F, L102I, L102W, L102W, L102Y, R103D, R103E, R103H, R103N, R103P, R103Q, R103S, R103T, R103K, R1031, R103M, S104H, S104P, S104A, S104T, L105A, L105C, L105D, L105E, L105G, L105H, L105K, L105N, L105P, L105Q, L105R, L105S, L105T, L105I, L105Y, L105V, T107H, T107K, T107R, T107N, T107G, T107D, T107E, L108A, L108C, L108D, L108E, L108G, L108H, L108K, L108N, L108P, L108Q, L108R, L108S, L108T, L108W, L108Y, L109A, L109C, L109D, L109E, L109G, L109H, L109K, L109N, L109P, L109Q, L109R, L109S, L109T, L109F, L109I, L109M, L109V, L109W, L109Y, R110A, R110C, R110G, R110P, R110K, R110N, R110H, R110Q, R110T, R110D, R110Y, L112A, L112C, L112D, L112E, L112G, L112H, L112K, L112N, L112P, L112Q, L112R, L112S, L112T, L112F, L112I, L112M, L112V, L112W, L112Y, G113H, G113T, A114C, A114D, A114E, A114G, A114H, A114K, A114N, A114P, A114Q, A114R, A114S, A114T, Q115P, Q115T, K116A, K116C, K116G, K116P, E117H, E117P, E117T, A118C, A118D, A118E, A118G, A118H, A118K, A118N, A118P, A118Q, A118R, A118S, A118T, I119A, I119C, I119D, I119E, I119G, I119H, I119K, I119N, I119P, I119Q, I119R, I119S, I119T, I119W, I119Y, S120P, S120T, A124D, A124H, A124P, A125P, A125T, A127H, A127P, A127T, L130A, L130C, L130D, L130E, L130G, L130H, L130K, L130N, L130P, L130Q, L130R, L130S, L130T, L130M, L130W, L130Y, I133A, I133C, I133D, I133E, I133G, I133H, I133K, I133N, I133P, I133Q, I133R, I133S, I133T, I133W, I133Y, A135H, A135P, D136P, D136T, F138A, F138C, F138D, F138E, F138G, F138H, F138K, F138N, F138P, F138Q, F138R, F138S, F138T, F138M, F138W, F138Y, R139A, R139C, R139G, R139P, R139T, R139H, R139K, R139Q, R139N, R139D, R139E, R139D, R139S, R139A, K140A, K140C, K140G, K140P, K140 D, K140E, L141A, L141C, L141D, L141E, L141G, L141H, L141K, L141N, L141P, L141Q, L141R, L141S, L141T, L141F, L141I, L141H, L141V, L141W, L141Y, F142A, F142C, F142D, F142E, F142G, F142H, F142K, F142N, F142P, F142Q, F142R, F142S, F142T, F142W, R143A, R143C, R143G, R143H, R143P, R143M, R143L, R143K, R143Q, R143E, R143W, R143D, R143N, R143A, R143T, R143S, V144A, V144C, V144D, V144E, V144G, V144H, V144K, V144N, V144P, V144Q, V144R, V144S, V144T, Y145A, Y145C, Y145D, Y145E, Y145G, Y145H, Y145K, Y145N, Y145P, Y145Q, Y145R, Y145S, Y145T, Y145W, S146D, S146H, S146P, S146T, S146F, S146L, S146Y, S146E, S146W, S146A, S146M, S146K, S146Q, S146G, S146N, N147P, N147T, N147D, F148A, F148C, F148D, F148E, F148G, F148H, F148K, F148N, F148P, F148Q, F148R, F148S, F148T, F148M, L149A, L149C, L149D, L149E, L149G, L149H, L149K, L149N, L149P, L149Q, L149R, L149S, L149T, L149F, L1491, L149H, L149V, L149W, L149Y, R150A, R150C, R150D, R150G, R150H, R150P, R150T, R150K, R150E, R150Q, G151E, G151H, G151N, G151P, G151Q, G151S, G151T, G151A, K152A, K152C, K152D, K152G, K152N, K152P, K152Q, K152S, K152T, L153A, L153C, L153D, L153E, L153G, L153H, L153K, L153N, L153P, L153Q, L153R, L153S, L153T, L153F, L153I, L153M, L153V, L153W, L153Y, K154A, K154C, K154D, K154E, K154G, K154H, K154N, K154P, K154Q, K154S, K154T, K154F, K154W, K154L, K154M, K154Y, L155A, L155C, L155D, L155E, L155G, L155H, L155K, L155N, L155P, L155Q, L155R, L155S, L155T, L155F, L155I, L155M, L155V, L155W, L155Y, Y156A, Y156C, Y156D, Y156E, Y156G, Y156H, Y156K, Y156N, Y156P, Y156Q, Y156R, Y156S, Y156T, Y156M, Y156W, Y156Y, T157A, T157C, T157F, T157G, T157I, T157L, T157M, T157P, T157V, T157W, T157Y, T157N, T157D, T157E, G158C, G158D, G158E, G158F, G158H, G1581, G158K, G158M, G158N, G158P, G158Q, G158R, G158S, G158T, G158V, G158W, G158Y, E159A, E159C, E159F, E159G, E159I, E159L, E159M, E159P, E159T, E159V, E159K, E159Y, A160D, A160F, A160H, A160I, A160L, A160P, A160V, A160W, A160Y, C161D, C161E, C161F, C161H, C161I, C161K, C161L, C161N, C161P, C161Q, C161R, C161S, C161T, C161V, C161W, C161Y, R162T, T163A, T163C, T163F, T163G, T163I, T163L, T163M, T163P, T163V, T163W, T163Y, G164F, G164H, G164I, G164N, G164P, G164Q, G164S, G164T, G164V, G164W, and G164Y, where the amino acid position that is modified corresponds to a mature human EPO polypeptide having the sequence set forth in SEQ ID NO: 2 or 237 or is at a corresponding position in an allelic or species variant or other variant of a mature human EPO polypeptide having at least or at least about 60%, 70%, 75%, 80%, 85%, 90%, 91%, 92%, 93%, 94%, 95%, 96%, 97%, 98%, 99%, or more sequence identity to a mature human EPO polypeptide set forth in SEQ ID NO: 2 or 237. Exemplary amino acids modifications that can contribute to reduced immunogenicity of a EPO polypeptide include any one or more amino acid modifications corresponding to any one or more modifications set forth on Table 4 corresponding to amino acid positions of a mature EPO polypeptide set forth in SEQ ID NO: 2 or 237.

TABLE 4
List of human EPO Modifications for Decreased Immunogenicity

| | | | | | | | | | |
|---|---|---|---|---|---|---|---|---|---|
| R4A | R4C | R4G | R4P | L5A | L5C | L5D | L5E | L5G | L5H |
| L5K | L5N | L5P | L5Q | L5R | L5S | L5T | I6A | I6C | I6D |
| I6E | I6G | I6H | I6K | I6N | I6P | I6Q | I6R | I6S | I6T |
| I6M | I6W | D8A | D8C | D8G | D8P | S9P | S9T | R10A | R10C |
| R10G | R10P | V11A | V11C | V11D | V11E | V11G | V11H | V11K | V11N |
| V11P | V11Q | V11R | V11S | V11T | V11F | V11I | V11M | V11W | V11Y |
| L12A | L12C | L12D | L12E | L12G | L12H | L12K | L12N | L12P | L12Q |
| L12R | L12S | L12T | L12F | L12I | L12M | L12V | L12W | L12Y | E13A |
| E13C | E13G | E13P | R14A | R14C | R14G | R14H | RHP | R14T | Y15A |
| Y15C | Y15D | Y15E | Y15G | Y15H | Y15K | Y15N | Y15P | Y15Q | Y15R |
| Y15S | Y15T | L16A | L16C | L16D | L16E | L16G | L16H | L16K | L16N |
| L16P | L16Q | L16R | L16S | L16T | L16W | L16Y | L17A | L17C | L17D |
| L17E | L17G | L17H | L17K | L17N | L17P | L17Q | L17R | L17S | L17T |
| L17F | L17I | L17M | L17V | L17W | L17Y | E18A | E18C | E18G | E18P |
| E18T | A19H | A19P | A19T | K20H | K20P | K20T | E21A | E21C | E21G |
| E21P | A22C | A22D | A22E | A22G | A22H | A22K | A22N | A22P | A22Q |
| A22R | A22S | A22T | E23P | E23T | N24A | N24C | N24G | N24P | I25A |
| I25C | I25D | I25E | I25G | I25H | I25K | I25N | I25P | I25Q | I25R |
| I25S | I25T | T27A | T27C | T27G | T27P | G28H | G28T | A30D | A30H |
| A30P | C33H | C33T | L35A | L35C | L35D | L35E | L35G | L35H | L35K |
| L35N | L35P | L35Q | L35R | L35S | L35T | L35M | L35W | L35Y | N38T |
| I39A | I39C | I39D | I39E | I39G | I39H | I39K | I39N | I39P | I39Q |
| I39R | I39S | I39T | T40D | T40H | V41A | V41C | V41D | V41E | V41G |
| V41H | V41K | V41N | V41P | V41Q | V41R | V41S | V41T | V41I | V41Y |
| D43T | V46A | V46C | V46D | V46E | V46G | V46H | V46K | V46N | V46P |
| V46Q | V46R | V46S | V46T | V46M | V46W | V46Y | F48A | F48C | F48D |
| F48E | F48G | F48H | F48K | F48N | F48P | F48Q | F48R | F48S | F48T |
| F48M | F48W | Y49A | Y49C | Y49D | Y49E | Y49G | Y49H | Y49K | Y49N |
| Y49P | Y49Q | Y49R | Y49S | Y49T | Y49M | Y49W | W51A | W51C | W51D |
| W51E | W51G | W51H | W51K | W51N | W51P | W51Q | W51R | W51S | W51T |
| K52A | K52C | K52G | K52H | K52P | K52T | K52E | K52D | R53A | R53C |
| R53G | R53H | R53P | R53Q | R53N | R53H | R53S | R53E | R53A | R53D |
| M54A | M54C | M54D | M54E | M54G | M54H | M54K | M54N | M54P | M54Q |
| M54R | M54S | M54T | M54F | M54I | M54L | M54V | M54W | M54Y | E55A |
| E55C | E55G | E55P | E55T | V56 | V56A | V56C | V56D | V56E | V56G |
| V56H | V56K | V56N | V56P | V56Q | V56R | V56S | V56T | V56F | V56I |
| V56L | V56W | V56Y | G57C | G57D | G57E | G57H | G57K | G57N | G57P |
| G57Q | G57R | G57S | G57T | Q58A | Q58C | Q58G | Q58P | Q59A | Q59C |
| Q59G | Q59H | Q59P | Q59T | Q59K | Q59R | Q59M | Q59W | Q59L | Q59Y |
| Q59F | Q59N | Q59E | Q59I | Q59A | A60C | A60D | A60E | A60G | A60H |
| A60K | A60N | A60P | A60Q | A60R | A60S | A60T | V61A | V61C | V61D |
| V61E | V61G | V61H | V61K | V61N | V61P | V61Q | V61R | V61S | V61T |
| V61W | E62H | E62P | E62S | E62T | V63A | V63C | V63D | V63E | V63G |
| V63H | V63K | V63N | V63P | V63Q | V63R | V63S | V63T | V63F | V63I |
| V63M | V63W | V63Y | W64A | W64C | W64D | W64E | W64G | W64H | W64K |
| W64N | W64P | W64Q | W64R | W64S | W64T | Q65A | Q65C | Q65G | Q65P |
| G66D | G66E | G66H | G66K | G66N | G66P | G66Q | G66R | G66S | G66T |
| L67A | L67C | L67D | L67E | L67G | L67H | L67K | L67N | L67P | L67Q |
| L67R | L67S | L67T | L67F | L67I | L67H | L67V | L67W | L67Y | A68C |
| A68D | A68E | A68G | A68H | A68K | A68N | A68P | A68Q | A68R | A68S |
| A68T | L69A | L69C | L69D | L69E | L69G | L69H | L69K | L69N | L69P |
| L69Q | L69R | L69S | L69T | L69F | L69I | L69M | L69W | L69Y | L70A |
| L70C | L70D | L70E | L70G | L70H | L70K | L70N | L70P | L70Q | L70R |
| L70S | L70T | L70Y | S71A | S71C | S71G | S71H | S71P | S71T | E72H |
| E72P | E72T | A73E | A73H | A73P | A73Q | A73T | V74A | V74C | V74D |
| V74E | V74G | V74H | V74K | V74N | V74P | V74Q | V74R | V74S | V74T |
| V74F | V74I | V74W | V74Y | L75A | L75C | L75D | L75E | L75G | L75H |
| L75K | L75N | L75P | L75Q | L75R | L75S | L75T | L75F | L75I | L75V |
| L75W | L75Y | R76A | R76C | R76G | R76P | G77H | G77P | G77T | A79H |
| A79P | L80A | L80C | L80D | L80E | L80G | L80H | L80K | L80N | L80P |
| L80Q | L80R | L80S | L80T | L80F | L80I | L80Y | L81A | L81C | L81D |
| L81E | L81G | L81H | L81K | L81N | L81P | L81Q | L81R | L81S | L81T |
| V82A | V82C | V82D | V82E | V82G | V82H | V82K | V82N | V82P | V82Q |
| V82R | V82S | V82T | W88A | W88C | W88D | W88E | W88G | W88H | W88K |
| W88N | W88P | W88Q | W88R | W88S | W88T | E89A | E89C | E89G | E89P |
| L91A | L91C | L91D | L91E | L91G | L91H | L91K | L91N | L91P | L91Q |
| L91R | L91S | L91T | L91F | L91I | L91M | L91V | L91W | L91Y | Q92A |
| Q92C | Q92G | Q92P | L93A | L93C | L93D | L93E | L93G | L93H | L93K |
| L93N | L93P | L93Q | L93R | L93S | L93T | L93M | L93W | L93Y | H94P |
| H94T | V95A | V95C | V95D | V95E | V95G | V95H | V95K | V95N | V95P |
| V95Q | V95R | V95S | V95T | V95F | V95I | V95M | V95W | V95Y | D96A |
| D96C | D96G | D96H | D96P | D96T | K97A | K97C | K97G | K97P | A98C |
| A98D | A98E | A98H | A98K | A98N | A98P | A98Q | A98R | A98S | A98T |
| V99A | V99C | V99D | V99E | V99G | V99H | V99K | V99N | V99P | V99Q |
| V99R | V99S | V99T | V99W | V99Y | S100D | S100H | S100N | S100P | S100Q |
| G101D | G101E | G101H | G101K | G101N | G101P | G101Q | G101R | G101S | G101T |
| L102A | L102C | L102D | L102E | L102G | L102H | L102K | L102N | L102P | L102Q |
| L102R | L102S | L102T | L102F | L102I | L102W | L102W | L102Y | R103D | R103E |
| R103H | R103N | R103P | R103Q | R103S | R103T | R103K | R103I | R103M | S104H |
| S104P | S104A | S104T | L105A | L105C | L105D | L105E | L105G | L105H | L105K |
| L105N | L105P | L105Q | L105R | L105S | L105T | L105I | L105Y | L105V | T107H |
| T107K | T107R | T107N | T107G | T107D | T107E | L108A | L108C | L108D | L108E |
| L108G | L108H | L108K | L108N | L108P | L108Q | L108R | L108S | L108T | L108W |
| L108Y | L109A | L109C | L109D | L109E | L109G | L109H | L109K | L109N | L109P |
| L109Q | L109R | L109S | L109T | L109F | L109I | L109M | L109V | L109W | L109Y |
| R110A | R110C | R110G | R110P | R110K | R110N | R110H | R110Q | R110T | R110D |
| R110Y | L112A | L112C | L112D | L112E | L112G | L112H | L112K | L112N | L112P |
| L112Q | L112R | L112S | L112T | L112F | L112I | L112M | L112V | L112W | L112Y |
| G113H | G113T | A114C | A114D | A114E | A114G | A114H | A114K | A114N | A114P |
| A114Q | A114R | A114S | A114T | Q115P | Q115T | K116A | K116C | K116G | K116P |
| E117H | E117P | E117T | A118C | A118D | A118E | A118G | A118H | A118K | A118N |
| A118P | A118Q | A118R | A118S | A118T | I119A | I119C | I119D | I119E | I119G |
| I119H | I119K | I119N | I119P | I119Q | I119R | I119S | I119T | I119W | I119Y |
| S120P | S120T | A124D | A124H | A124P | A125P | A125T | A127H | A127P | A127T |
| L130A | L130C | L130D | L130E | L130G | L130H | L130K | L130N | L130P | L130Q |
| L130R | L130S | L130T | L130M | L130W | L130Y | I133A | I133C | I133D | I133E |
| I133G | I133H | I133K | I133N | I133P | I133Q | I133R | I133S | I133T | I133W |
| I133Y | A135H | A135P | D136P | D136T | F138A | F138C | F138D | F138E | F138G |
| F138H | F138K | F138N | F138P | F138Q | F138R | F138S | F138T | F138M | F138W |
| F138Y | R139A | R139C | R139G | R139P | R139T | R139H | R139K | R139Q | R139N |
| R139D | R139E | R139D | R139S | R139A | K140A | K140C | | | |

[0323] b. Glycosylation

[0324] Many proteins with therapeutic activity contain one or more glycosylation sites, i.e., amino acid sequences that are glycosylated by a eukaryotic cell. The degree of glycosylation of therapeutic proteins can be altered in order to achieve 1) reduced immunogenicity; 2) less frequent administration of the protein; 3) increased protein stability such as increased serum half-life; and 4) reduction in adverse side effects such as inflammation. The glycosylation site(s) provides a site for attachment of a carbohydrate moiety on the subject polypeptide, such that when the subject polypeptide is produced in a eukaryotic cell capable of glycosylation, the subject polypeptide is glycosylated. The further glycosylation of an EPO polypeptide confers one or more advantages including increased serum half-life; reduced immunogenicity; increased functional in vivo half-life; reduced degradation by gastrointestinal tract conditions such as gastrointestinal tract proteases; and increased rate of absorption by gut epithelial cells. An increased rate of absorption by gut epithelial cells and reduced degradation by gastrointestinal tract conditions is important for enteral (e.g., oral) formulations of an EPO polypeptide.

[0325] Glycosylation can increase serum-half-life of polypeptides by increasing the stability, solubility, and reducing the immunogenicity of a protein. Glycosylation can increase the stability of proteins by reducing the proteolysis of the protein and can protect the protein from thermal degradation, exposure to denaturing agents, damage by oxygen free radicals, and changes in pH. Glycosylation also can allow the target protein to evade clearance mechanisms that can involve binding to other proteins, including cell surface receptors. Carbohydrate moieties that contain sialic acid can affect the solubility of a protein. The sialic acid moieties are highly hydrophilic and can shield hydrophobic residues of the target protein. This decreases aggregation and precipitation of the target protein. Decreased aggregation also aids in the prevention of the immune response against the target protein. Carbohydrates can furthermore shield immunogenic sequences from the immune system. The volume of space occupied by the carbohydrate moieties can decrease the available surface area that is surveyed by the immune system. These properties lead to the reduction in immunogenicity of the target protein.

[0326] Glycosylation of proteins results in the formation of glycoproteins due to the covalent attachment of oligosaccharides to a polypeptide. The carbohydrate modifications found in glycoproteins are linked to the protein component through either O-glycosidic or N-glycosidic bonds. The predominant carbohydrate attachment in glycoproteins of mammalian cells is via N-glycosidic linkage. The N-glycosidic linkage is through the Nitrogen of the amide group of asparagines. The site of carbohydrate attachment to N-linked glycoproteins is found within a consensus sequence of amino acids, N-X-S/T, where X is any amino acid except proline. In N-linked glycosylation, the carbohydrate directly attached to the protein is a 14-residue oligosaccharide, N-acetylglucosamine (GlcNAc). Glycosyltransferases subsequently alter the attached oligosaccharide to form a mature N-glycan. N-linked oligosaccharides contain mannose, N-acetylglucosamine and typically have several branches of carbohydrates, each terminating with a negatively charged sialic acid residue. Protein secondary structure can affect the availability of consensus sites as targets for glycosylation. Since glycosylation is known to be highly host cell-dependent, the sugar chains associated with N-linked glycosylation of a protein can differ (Kagawa et al., (1988) JBC 263:17508-17515). The O-glycosidic linkage is to the hydroxyl of serine, threonine or hydroxylysine. In Ser- and Thr-type O-linked glycoproteins, the carbohydrate directly attached to the protein is a monosaccharide, such as N-acetylgalactosamine (GalNac) or galactose. Glycosyltransferases subsequently attach additional carbohydrate moieties to the modified residue to form a mature O-glycan, which typically contains one to four sugar residues. O-linked glycosylation typically occurs at sites defined by protein secondary structures, such as an extended beta turn. A number of O-linked glycosylation sites are known in the art and have been reported in the literature, see e.g., Ten Hagen et al. (1999) J. Biol. Chem., 274:27867-74; Hanisch et al. (2001) Glycobiology, 11:731-740; and Ten Hagen et al., (2003) Glycobiology, 13:1R-16R.

[0327] Modified EPO polypeptides provided herein can further be glycosylated (i.e., hyperglycosylated) as compared to an unmodified EPO polypeptide due to a carbohydrate moiety covalently linked to at least one non-native glycosylation site not found in the unmodified EPO polypeptide or a carbohydrate moiety covalently linked to at least one native glycosylation site found but not glycosylated in the unmodified EPO polypeptide. An EPO polypeptide can be modified at one or more positions to affect glycosylation of the polypeptide. A hyperglycosylated EPO polypeptide can include O-linked glycosylation, N-linked glycosylation, and/or a combination thereof. In some examples, a hyperglycosylated EPO polypeptide can include 1, 2, 3, 4, 5 or more carbohydrate moieties, each linked to different glycosylation sites. The glycosylation site can be a native glycosylation site. In other examples, the hyperglycosylated polypeptide can be glycosylated at a single non-native glycosylation site. In still other examples, the hyperglycosylated polypeptide can be glycosylated at more than one non-native glycosylation site, for example, the hyperglycosylated EPO polypeptide can be glycosylated at 1, 2, 3, 4, 5 or more non-native glycosylation sites. Glycosylation sites in an EPO polypeptide can be created, altered, eliminated or rearranged. For example, native glycosylation sites can be modified to prevent glycosylation or enhance or decrease glycosylation, while other positions in the EPO polypeptide can be modified to create new glycosylation sites or enhance or decrease glycosylation of existing sites. In some examples, the carbohydrate content of the EPO polypeptide can be modified. For example, the number position, bond strength, structure and composition of the carbohydrate linkages (i.e., structure of the carbohydrate based on the nature of the glycosidic linkages or branches of the carbohydrate) of carbohydrate moieties added to the EPO polypeptide can be altered. Such properties vary between the different known recombinant erythropoietins, such as epoetin-α, epoetin-β, epoetin-ω and epoetin-δ, and between urinary human erythropoietin. In one example the number of sialic moieties of a modified EPO polypeptide provided herein is modified.

[0328] Changes in the carbohydrate content of the glycosylated EPO polypeptides provided herein, including sialic acid content, can be generated by any method known in the art including but not limited to modification of the primary sequence of the EPO polypeptide, enzymatic or chemical modification, production in different host cells, or modified host cells, to produce differences in the glycosylation pattern, and purification methods to enrich EPO polypeptides with specific glycosylation profiles. Such methods are known in the art and include, for example, modified EPO polypeptides as described in U.S. Patent Publication Nos. 2004-0137557, 2005-0153879, 2005-0181359, 2005-0192211, 2005-0288220, 2006-0088906, and 2006-0121611. Additionally, growth conditions (e.g., media composition) in which host cells express the modified EPO polypeptides can be altered to provided changes in glycosylation, in particular, sialic acid content (see e.g., U.S. Patent Publication No. 2004-0115768).

[0329] Commercial products that contain EPO polypeptides have been developed that differ in the glycosylation of the EPO polypeptide, such as by changing the number of glycosylation sites or altering the glycosylation pattern or content of the carbohydrate moieties attached to the EPO polypeptide. For example Epogen® (Amgen) is an α-glycosylated form produced in CHO cells with 22 sialic acid residues, having a molecular weight of 30,400 Da; Neorecormon® (or Recormon®; Roche) is a β-glycosylated form of EPO produced in CHO cells, which has a higher molecular weight and a lower number of sialylated glycan residues; Epomax® (Elanex), or epoetin-ω, is produced in BHK cells has a molecular 35 kDa and differs from α and β forms in the amounts of glycosylation, in particular, different amounts of sialylation.

[0330] In some instances, a hyperglycosylated EPO polypeptide is glycosylated at a native glycosylation site. For example, EPO, such as for example human EPO having an amino acid sequence set forth in SEQ ID NO: 2 or 237, contains N-linked glycosylation sites at N24, N38, and N83 and an O-linked glycosylation site at S126 (with respect to a mature EPO polypeptide as set forth in SEQ ID NO: 2 or 237). The EPO polypeptide can be glycosylated at a single native glycosylation site, or at more than one native glycosylation site, e.g., at 1, 2, 3, 4, 5, or more native glycosylation sites. A hyperglycosylated EPO polypeptide also can be glycosylated at a native glycosylation site and a non-native glycosylation site. A hyperglycosylated EPO polypeptide also can be glycosylated at multiple native and non-native glycosylation sites.

[0331] Modified EPO polypeptides provided herein can have at least one additional carbohydrate moiety not found in the unmodified EPO polypeptide when each is synthesized in a eukaryotic cell that is capable of N- and/or O-linked protein glycosylation. Thus, for example, compared to an unmodified EPO polypeptide, a hyperglycosylated modified EPO polypeptide can have at least 1, at least 2, at least 3, at least 4, at least 5, at least 6, at least 7, at least 8, at least 9, at least 10, or more additional carbohydrate moieties. For example, where an unmodified EPO polypeptide has one covalently linked carbohydrate moiety, a hyperglycosylated EPO polypeptide can have 2, 3, 4, 5, 6, 7, 8, 9, 10, or more covalently linked carbohydrate moieties. In some examples, a hyperglycosylated EPO polypeptide of a modified EPO polypeptide provided herein, lacks a carbohydrate moiety covalently linked to a non-native glycosylation site, and has instead at least 1, at least 2, at least 3, at least 4, at least 5, at least 6, at least 7, at least 8, at least 9, at least 10, or more additional carbohydrate moieties attached to native glycosylation sites. In other examples, a hyperglycosylated EPO polypeptide lacks a carbohydrate moiety covalently linked to a native glycosylation site, and has instead at least 2, at least 3, at least 4, at least 5, at least 6, at least 7, at least 8, at least 9, at least 10, or more carbohydrate moieties attached to non-native glycosylation sites.

[0332] Exemplary amino acid positions contemplated herein for modification of a glycosylation site, for attachment of a carbohydrate moiety, include positions corresponding to native positions, such as N24, N38, N83, and S126 of a mature EPO polypeptide set forth in SEQ ID NO: 2 or 237. In some examples, the modified EPO polypeptide has one or more modifications that eliminates one, two, three or four native glycosylation sites or all glycosylation sites. Amino acid replacement or replacements are known in the art that can be modified to prevent glycosylation, to create new glycosylation sites, enhance or decrease glycosylation of existing sites, or a combination thereof. For example, amino acid modifications can include one or more of the following non-limiting examples: N38H/R139H, N38H/R139H/R4H, N38H/R139H/L93I, N38H/R139H/K20Q, N38H/R139H/E159N, N38H/R139H/K52N, N38H/R139H/L153V, N38H/N83H/R139H, K20Q/N38H/N83H/R139H, N38H/N83H/R139H/L93V, N38H/N83H/R139H/L80I, N38H/N83H/R139H/L93I, K20Q/N38H/L80I/N83H/R139H, K20Q/N38H/N83H/L93I/R139H, K20Q/N38H/N83H/L93V/R139H, N24H/N38H/N83H/R139H/L80I, N24H/N38H/N83H/R139H/L93I, N24H/N38H/N83H/R139H/L93V, K20Q/N24H/N38H/N83H/R139H/L80I, K20Q/N24H/N38H/N83H/R139H/L93I, K20Q/N24H/N38H/N83H/R139H/L93V, R4H/K20Q/N24H/N38H/N83H/R139H/L80I, E159N/K20Q/N24H/N38H/N83H/R139H/L93I, K20Q/N24H/N38H/N83H/R139H/L153V, L153V/K20Q/N24H/N38H/N83H/R139H/L80I, E159N/K20Q/N24H/N38H/N83H/R139H/L80I, A30N, W51N, G57N, L69N, W88N, E89N, D136N, F138N, K52N/M54T, R53N/E55T, A30N/H32T/P87V/W88N/P90T, A30N/H32T/P87V/W88N/P90T/A125T, A30N/H32T/R53N/E55T/P87V/W88N/P90T, E55N/G57T, Q86N/P87V/W88T, P87A/W88N/P90T, P87V/W88N/P90S, P87V/W88N/E89G/P90T, A30N/H32T/R53N/E55T, A114N/K116T, A30N/H32T/A114N/K116T, A30N/H32T/R53N/E55T/P87V/W88N/P90T/A114N/K116T, A30N/H32T/E55N/G57T, A30N/H32T/E55N/G57T/P87V/W88N/P90T, A30N/H32T/E55N/G57T/A114N/K116T, A30N/H32T/P87V/W88N/P90T/A114N/K116T, A30N/H32T/E55N/G57T/P87V/W88N/P90T/A114N/K116T, A30N/H32T/E55N/G57T/P87V/W88N/P90T/A124P/A125T/S126T, A30N/H32T/E55N/G57T/A114N/K116T/A124P/A125T/S126T, R4N/I6S, S9N/V11S, L69N, A124N, A125N/A127S, T163N/D165S, A125T, A125T/A124P, L69N/S71T, L69N/A68S/S71T, A125N/A127T, A125N/A127T/R131T, A125N/A124P/A127S, A125N/A124P/A127T, A125T/S126T, A125T/A124P/S126T/R131S, A30N/H32T, A30N/H32T/P87V/W88N/P90T, W51N/R53T, P87V/W88N/P90T, P87S/W88N/P90T, P87S/W88N/E89G/P90T, P87S/W88N/P90T/Q92T, P87S/W88N/P90T/R162A, L69N/S71T/P87S/W88N/P90T, L69N/S71T/P87V/W88N/P90T, E89N/P90I/L91T, P87S/E89N/P90I/L91T, D136N/F138T, F138N/K140T, A125T, A124P/A125T, N24Q/P87S/W88N/P90T, N38Q/P87S/W88N/P90T, N83Q/P87S/W88N/P90T of a mature EPO polypeptide set forth in SEQ ID NO: 2 or 237 (see e.g., U.S. Pat. No. 5,856,298, U.S. Patent Publication No. 2003-0120045; International Patent Publication No. EP 0640619). In some examples, amino acid modifications can include relocation of a native glycosylation site, such as N38 to another site, such as W51, G57, L69, W88, E89, D136, or F138 of a mature EPO (see e.g., PCT Publication No. WO 01/81405). In a particular embodiment, the amino acid replacement or replacements contributing to hyperglycosylation of modified EPO polypeptides is (are) replacement of amino acids by asparagines (N) or threonine (T). In another particular embodiment the amino acid modifications are selected from one or both of the following modifications: A30N/H32T and P87V/W88N/P90T (Elliot et al. (2004) J. Biol. Chem. 279(16): 16854-16862; Elliott et al. (2003) Nat. Biotechnol. 21: 414-421.). Any of the modifications provided herein can be combined with any modifications that generate a hyperglycosylated erythropoietin analogue. One non-limiting hyperglycosylated erythropoietin analogue is the novel erythropoiesis stimulating protein (NESP), which contains the amino acid modifications A30N, H32T, P87V, W88N, P90T (see e.g., PCT publication WO 00/24893, available as Aranesp® (Amgen Inc); SEQ ID NO: 228).

[0333] Whether an EPO polypeptide has N-linked and/or O-linked glycosylation is readily determined using standard techniques, such as, for example, enzymatic treatment, electrophoresis analysis, isoelectric focusing, and immunohistochemistry (see e.g., “Techniques in Glycobiology” R. Townsend and A. Hotchkiss, eds. (1997) Marcel Dekker; and “Glycoanalysis Protocols (Methods in Molecular Biology, Vol. 76)” E. Hounsell, ed. (1998) Humana Press. The change in electrophoretic mobility of a protein before and after treatment with chemical or enzymatic deglycosylation (e.g., using endoglycosidases and/or exoglycosidases) is routinely used to determine the glycosylation status of a protein. Enzymatic deglycosylation can be carried out using any of a variety of enzymes, including, but not limited to, peptide-N4-(N-acetyl-β-D-glycosaminyl) asparagine amidase (PNGase F); endoglycosidase F1, endoglycosidase F2, endoglycosidase F3, α(2→3,6,8,9) neuraminidase, and the like. For example, sodium dodecyl sulfate-polyacrylamide gel electrophoresis (SDS-PAGE) analysis of the protein, either pre-treated with PNGaseF or untreated with PNGaseF, is conducted. A marked decrease in band width and change in migration position after treatment with PNGaseF is considered diagnostic of N-linked glycosylation. The carbohydrate content of a glycosylated protein also can be detected using lectin analysis of protein blots (e.g., proteins separated by SDS-PAGE and transferred to a support, such as a nylon membrane). Lectins, carbohydrate binding proteins from various plant tissues, have high affinity and narrow specificity for a wide range of defined sugar epitopes found on glycoprotein glycans (Cummings (1994) Methods in Enzymol. 230:66-86). Lectins can be detectably labeled (either directly or indirectly), allowing detection of binding of lectins to carbohydrates on glycosylated proteins. For example, when conjugated with biotin or digoxigenin, a lectin bound to a glycosylated protein can be easily identified on membrane blots through a reaction utilizing avidin or anti-digoxigenin antibodies conjugated with an enzyme such as alkaline phosphatase, β-galactosidase, luciferase or horse radish peroxidase, to yield a detectable product. Screening with a panel of lectins with well-defined specificity provides considerable information about a glycoprotein's carbohydrate complement.

[0334] As described above, glycosylated or hyperglycosylated EPO polypeptides have been developed, including commercially glycosylated or hyperglycosylated recombinant EPO forms. Such glycosylated forms have been found to have higher proliferation activity in vivo as compared to a non-glycosylated EPO polypeptide, most likely due to rapid clearance of the non-glycosylated form (see e.g., Lukowsky and Painter (1972) Can. J. Biochem. 60: 909-917; Goldwasser et al. (1974) J. Biol. Chem. 249, 4202-4206; Sasaki (1987) Methods Enzymol. 147: 328-340; Goto et al. (1988) Bio/technology 6: 67-71). Nevertheless, some forms of EPO polypeptides with decreased or no glycosylation, while exhibiting less proliferation activity in vivo, also have been reported to possess higher proliferation activity in in vitro assays and greater binding to an EPO receptor relative to wild-type glycosylated EPO and other glycosylated forms of EPO (see e.g., Yamaguchi et al. (1991) 266(30): 20434-20439). Accordingly, one can select an expression system (e.g., bacterial or various mammalian cells, such as CHO or BHK) for expression of a modified EPO polypeptide provided herein to generate a particular level of EPO glycosylation or no glycosylation, depending on the application of the EPO polypeptide. Non-glycosylated forms of modified EPO polypeptides can be particularly useful, for example, for in vitro assays as controls for EPO activity, for detection of EPO receptor concentration, or employed in assays or screens for EPO inhibitors.

[0335] c. Additional or Alternative Modifications

[0336] Additional or alternative modifications of polypeptides provided herein include chemical derivatization of polypeptides, including but not limited to, acetylation and carboxylation; changes in amino acid sequence that make the protein susceptible to PEGylation or other modification or that alter properties of the EPO polypeptide. Related moieties for modifying EPO polypeptides also are contemplated, including, but not limited to copolymers of polyethylene glycol and polypropylene glycol, carboxymethylcellulose, dextran, polyvinyl alcohol, polyvinylpyrrolidine or polyproline (Abuchowski et al. (1981); Newmark et al. (1982); and Katre et al. (1987)). A modified EPO polypeptide provided herein can be modified with one or more polyethylene glycol moieties (PEGylated). Activated PEG derivatives can be used to interact directly with the EPO polypeptides, and include active esters of carboxylic acid or carbonate derivatives, particularly those in which the leaving groups are N-hydroxysuccinimide, p-nitrophenol, imidazole or 1-hydroxy-2-nitrobenzene-4-sulfonate. PEG derivatives containing maleimido or haloacetyl groups can be used for the modification of sulfhydryl groups, and PEG reagents containing hydrazine or hydrazide groups can be used to modify aldehydes generated by periodate oxidation of carbohydrate groups. In some instances, a modified EPO polypeptide provided herein can contain one or more non-naturally occurring pegylation sites that are engineered to provide PEG-derivatized polypeptides with reduced serum clearance. Exemplary amino acid modification to create PEGylation can include, but are not limited to, A1C, P2C, P3C, R4C, D8C, S9C, N24C, 125C, T26C, T27C, G28C, A30C, E31C, H32C, S34C, N36C, N38C, 139C, T40C, D43C, T44C, K45C, N47C, A50C, K52C, E55C, G57C, Q58C, G77C, Q78C, A79C, N83C, S84C, S85C, Q86C, W88C, E89C, T107C, R110C, A111C, G113C, A114C, Q115C, K116C, E117C, A118C, S120C, P121C, P122C, D123C, A124C, A125C, A127C, A128C, T132C, K154C, T157C, G158C, E159C, A160C, T163C, G164C, and D165C of a mature EPO polypeptide (see e.g., U.S. Patent Publication No: 2005-0107591 and International Patent Publication No. WO 90/12874). In addition, N-terminal cysteine(s) can be added to the EPO polypeptide to produce free thiol groups for attachment of groups, such as PEG moieties (see e.g., U.S. Patent Publication No. 2005-0170457).

[0337] Also contemplated are modified EPO polypeptide sequences that have phosphorylated amino acid residues, e.g., phosphotyrosine, phosphoserine, or phosphothreonine (see e.g., U.S. Pat. No. 6,335,176).

[0338] Other suitable additional modifications of a modified EPO polypeptide provided herein are polypeptides that have been modified using ordinary chemical techniques so as to improve their resistance to proteolytic degradation, to optimize solubility properties, or to render them more suitable as a therapeutic agent. For example, the backbone of the peptide can be cyclized to enhance stability (see e.g., Friedler et al. (2000) J. Biol. Chem. 275:23783-23789). Another exemplary modification includes addition of hydroxyalkylstarch (HAS) moieties to the modified EPO polypeptides provided herein. Exemplary methods of hasylation of EPO polypeptides are known in the art and are described, for example, in U.S. Patent Publication No. 2006-0019877. Yet another exemplary modification includes carbamylation of the N-terminal amino acid or primary amines of amino acids of the modified EPO polypeptides provided herein. Exemplary methods of carbamylation of EPO polypeptides are known in the art and are described, for example, in U.S. Patent Publication No. 2006-0135754.

[0339] Non-natural amino acids can be incorporated into the modified EPO polypeptides provided herein. Non-natural amino acids also can be incorporated at sites identified herein for increased protease resistance. Analogs can be used that include residues other than naturally occurring L-amino acids, e.g., D-amino acids or non-naturally occurring synthetic amino acids. Exemplary non-naturally occurring synthetic amino acids include, but are not limited to, an unnatural analogue of a tyrosine amino acid; an unnatural analogue of a glutamine amino acid; an unnatural analogue of a phenylalanine amino acid; an unnatural analogue of a serine amino acid; an unnatural analogue of a threonine amino acid; an alkyl, aryl, acyl, azido, cyano, halo, hydrazine, hydrazide, hydroxyl, alkenyl, alkynl, ether, thiol, sulfonyl, seleno, ester, thioacid, borate, boronate, phospho, phosphono, phosphine, heterocyclic, enone, imine, aldehyde, hydroxylamine, keto, or amino substituted amino acid, or any combination thereof; an amino acid with a photoactivatable cross-linker; a spin-labeled amino acid; a fluorescent amino acid; an amino acid with a unnatural functional group; an amino acid that covalently or noncovalently interacts with another molecule; a metal binding amino acid; a metal-containing amino acid; a radioactive amino acid; a photocaged and/or photoisomerizable amino acid; a biotin or biotin-analogue containing amino acid; a glycosylated or carbohydrate modified amino acid; a keto containing amino acid; amino acids comprising polyethylene glycol or polyether; a heavy atom substituted amino acid; a chemically cleavable or photocleavable amino acid; an amino acid with an elongated side chain; an amino acid containing a toxic group; a sugar substituted amino acid, e.g., a sugar substituted serine or the like; a carbon-linked sugar-containing amino acid; a redox-active amino acid; an α-hydroxy containing acid; an amino thio acid containing amino acid; an α, a disubstituted amino acid; a β-amino acid; and a cyclic amino acid other than proline. For example, the unnatural amino acid can be, but is not limited to, an O-methyl-L-tyrosine, an L-3-(2-naphthyl)alanine, a 3-methyl-phenylalanine, an O-4-allyl-L-tyrosine, a 4-propyl-L-tyrosine, a tri-O-acetyl-GlcNAc β-serine, an L-Dopa, a fluorinated phenylalanine, an isopropyl-L-phenylalanine, a p-azido-L-phenylalanine, a p-acyl-L-phenylalanine, a p-benzoyl-L-phenylalanine, an L-phosphoserine, a phosphonoserine, a phosphonotyrosine, a p-iodo-phenylalanine, a p-bromophenylalanine, a p-amino-L-phenylalanine, para-acetyl-phenylalanine (pAcF), L-difluoromethionine (DFM), and an isopropyl-L-phenylalanine.

[0340] Non-natural amino acids can be incorporated into the EPO polypeptides provided herein by any method known in the art including, but not limited to, derivatization of amino acids with reactive side-chains, chemical synthesis, enzymatic ligation, native chemical ligation, an in vitro biosynthetic method in which a suppressor tRNA is chemically or enzymatically acylated with an unnatural amino acid, an in vivo method, in which a suppressor tRNA is acylated with an unnatural amino acid by selective pressure incorporation, modification of synthetases that have proofreading mechanisms to allow incorporation of unnatural amino acids onto tRNAs, a microinjection technique of tRNAs to incorporate unnatural amino acids into proteins, or an in vivo method of generating modified orthogonal tRNAs carrying unnatural amino acids using orthogonal tRNA synthetases (see e.g., Dawson and Kent, (2000) Annu. Rev. Biochem. 69: 923; Cornish et al. (1995) Chem. Int. Ed. Engl. 34:621; Noren et at (1989) Science 244: 182-188; Bain et al. (1989) J. Am. Chem. Soc. 111: 8013-8014; Budisa et al. (1999) FASEB J., 13:41; Nowak et al. (1995) Science 268: 439; Dougherty (2000) Curr. Opin. Chem. Biol. 4: 645; Brunner (19993) Chem. Soc. Rev. 22: 183-189; U.S. Patent Publication Nos. 2006-0233744 and 2006-0153860).

[0341] Modifications of EPO polypeptides provided herein also can be combined with modifications to improve post-translational processing of the EPO polypeptides. For example, EPO can be modified to improve proteolytic cleavage of the signal sequence or to improve post-translational modifications such as glycosylation, as discussed above.

[0342] Modifications of EPO polypeptides provided herein also can be combined with amino acid modifications to further improve stability, binding properties and serum half-life of the EPO polypeptides. For example further modifications can include mutations that affect the ability of EPO polypeptides to bind with its receptor, such as an EPO receptor (EPOR) or secondary receptor. For example, amino acid modifications can be made in the molecular contact areas between the EPO polypeptide and its receptor. Such modifications can increase or decrease the interaction with the receptor or increase or decrease activation of the receptor by EPO. Exemplary amino acid modifications that can affect EPO interactions with its receptor can include any of the following non-limiting examples: C7A, R14A/Y15A, L16A, P42A, D43A, F48A, Y49A, T132A, I133A, T134A, N147A, P148A, R150A, K152W, G151A, G158A, C161A, R162A, F48V, F138V F142V, F148V D8S, S9A, S9N, R10A, E13A, R14L, Y15F, L16A, L16S, L17A, L17S, K20A, K201, K20R, K45A, K45R, N47A, F48I, F48S, Y49F, Y49S, K52S, K52R, K52Q, Q78A, Q78E, Q78R, D96A, K97R, S100A, S103K, T107A, T107L, T107S, R110T, R131T, K140A, K140R, K140M, K140T, R143E, K154A, K154R, K154S, R10I, V11S, R14A, R14E, R14Q, Y151, K20E, T44I, K45I, K45D, V46A, F48G, K52E, D96R, K97A, K97E, V99A, V99S, S100R, S100E, S100T, S103A, S103E, S103H, S103N, S103Q, S104A, S104I, L108A, L108K, R110E, R143A, N147A, N147K, R150A, R150Q, R150E, G151A, L155A, and L155N (see e.g., U.S. Patent Publication Nos. 2004-0122216, 2005-0176627, 2006-0008872; Syed (1998) Nature 395:511-516).

[0343] Modifications of EPO polypeptides provided herein also can be combined with extensions of the carboxy terminus that can improve the properties of an EPO polypeptide. One non-limiting example is an extension of the protein derived from C-terminal end of human chorionic gonadotropin (SSSSKAPPPSLPSPSRLPGPSDTPILPQ; see e.g., U.S. Patent Publication No. 2003-0120045). In another non-limiting example, additions of positively charged basic amino acids in the carboxyl terminal region of the modified EPO polypeptide provided herein can increase the biological activity of EPO (see e.g., U.S. Pat. No. 5,457,089). In one non-limiting example, one or more Arginine or Lysine residues are added to the C-terminus of the modified EPO polypeptides provided herein (e.g., R166/R167, R166/R167/A168, R166/R167/K168/R169, R166/R167/K168/R169/A170, R166/R167-176(poly Lysine), R166/R167-176(poly Lysine)/A177.

[0344] Modifications of EPO polypeptides provided herein also can be combined with other modifications that result in EPO polypeptides with improved properties, including, but not limited to, improved stability, improved serum half-life, improved purification, or altered erythropoietic or tissue protective activity. Exemplary modifications include, but are not limited to, I6A, C7A, C7S, C7H, S9A, R10A, R10I, V11S, L12A, E13A, R14A, R14L, R14E, R14Q, Y15F, Y15A, Y15I, L16A, L17A, E18A, K20A, K20E, E21A, N24Q, N38Q, N24K, C29S, C29Y, A30N, H32T, C33S, C33Y, N38K, P42N, P42A, D43A, T44I, K45A, K45D, V46A, N47A, F48A, F48I, F48S, Y49A, Y49S, Y49F, Y49A, A50S, A50S, W51F, W51N, W51S, K52A, K52S, M54L, Q59A, Q59N, E62A, E62T, W64A, Q65A, G66A, L67S, L69A, L70A, S71A, E72A, A73G, R76A, Q78A, N83K, N83Q, Q92A, L93A, H94A, V95A, D96R, D96A, K97A, S100A, S100R, S100E, S100T, G101A, G101I, L102A, R103A, R103D, R103N, R103E, R103Q, R103H, R103L, R103K, S104A, S104A, S104I, L105A, T106A, T1061, T107A, T107L, L108A, L108K, L109A, K116A, E117G, S126A, S126T, S126G, T132A, 1133A, T134A, D136A, R139A, R139C, K140A, F142I, R143A, Y145F, Y145A, S146A, N147A, N147K, F148Y, L149A, R150A, R150E, G151A, K152A, K152W, L153A, K154A, L155A, Y156A, Y156F, T157A, G158A, E159A, C160S, C161A, R162A, R166G, K45D/S100E, A30N/H32T, K45D/R150E, R103E/L108S, K140A/K52A, K140A/K52A/K45A, K97A/K152A, K97A/K152A/K45A, K97A/K152A/K45A/K52A, K97A/K152A/K45A/K52A/K140A, K97A/K152A/K45A/K52A/K140A/K154A, N24K/N38K/N83K, N24K/Y15A, C33X/R139C/ΔR166, R139C/ΔR166 (see e.g., U.S. Pat. Nos. 4,703,008, 4,835,260, 5,457,089, 5,614,195, 6,048,971, 6,489,293; U.S. Patent Publication No. US 2005-0176627; International Patent Publication Nos. WO 86/03520, WO 94/25055, WO 94/24160, WO 2001/36489, WO 2004/003176, WO 2005/103076).

[0345] The additional modifications to the modified EPO polypeptide provided herein include deletions of modified EPO polypeptides that retain at least one activity of an EPO polypeptide. Such deletions include truncations at either the terminii of the polypeptide or internal deletions. Such deletions are known in the art and include, for example, truncations in the C-terminus of the EPO polypeptide (e.g., residues A160, C161, R162, T163, G164, D165, R166), N-terminus of the EPO polypeptide (e.g, residues P2, P3, R4, L5, I6) and internal deletions (e.g., T27-E55) (see e,g., U.S. Pat. Nos. 4,703,008, 5,457,089).

[0346] Any additional modifications that alter properties or activities of EPO polypeptides, such as erythropoietic and tissue protective activity, that are known in the art can be combined with the modifications provided herein. One or more properties of an EPO polypeptide can be altered as a result of a modification or combination of modifications. Non-limiting examples include modifications to interaction sites with an EPO receptor that improve erythropoietic activity, some of which are listed above.

[0347] Modifications of EPO polypeptides provided herein also can be combined with naturally occurring variants of EPO or derived from SNPs of EPO. Exemplary natural variants include, for example, C7H, Y15F, Y49F, Y145F, S126M, D43N, G77S, and S120C (see e.g., U.S. Pat. Nos. 4,703,008, 5,955,422, and 7,041,794).

### E. COMPENSATION FOR ABSENT GLYCOSYLATION BY PROTEASE RESISTANT MODIFICATION(S) OF THERAPEUTIC POLYPEPTIDES

[0348] Provided herein are modified therapeutic polypeptides that are normally glycosylated in vivo, for example, modified EPO polypeptides, that contain one or more amino acid modifications that confer increased protease resistance to the polypeptide to proteases in vitro or in vivo (e.g., in serum, blood, digestie tract).

[0349] Generally, glycosylated therapeutic proteins require glycosylation for effective administration in vivo. Glycosylated therapeutic proteins contain one or more sites for the attachment of carbohydrate moieties to the protein at specific sites, such as asparagine (N-linked) or serine (O-linked) amino acid residues. Glycosylation typically protects the native protein from degradation by proteases of the secretory pathway during production of the protein or by extracellular proteases following secretion. In addition, glycosylation can protect a therapeutic polypeptide from degradation by proteases of the blood or digestive system following therapeutic administration.

[0350] Non-glycosylated therapeutic polypeptides are often unstable, in part due to increased proteolytic degradation in vivo. For example, removal of all or part of the carbohydrate moiety increases the susceptibility of the therapeutic polypeptide to degradation by proteases by exposing protease sensitive sites to proteolytic attack. In the glycosylated form of the polypeptide, glycosylation can protect the therapeutic polypeptide from degradation by masking or shielding these protease sensitive sites. For example, glycosylation can prevent access to the protease sensitive site by physical interference by carbohydrate moiety or a change in protein conformation.

[0351] Upon in vivo administration, however, deglycosylation of glycosylated therapeutic proteins can occur in vivo by exposure to extracellular glucosidases (e.g., lactase, neuraminidase, amylases) of the circulatory and digestive systems. It is contemplated that this is particularly true in the digestive tract, which is rich in glucosidases and other digestive enzymes. Thus, it is believed that although glycosylation of therapeutic proteins, such as EPO, can provide some increased half-life when administered by injection subcutaneously or intravenously, glycosylation provides lesser protection upon oral administration. Hence, therapeutic proteins, including therapeutic glycoproteins, when administered orally are not efficiently absorbed probably due to their degradation by digestive proteases. Accordingly, modifications that render the polypeptide protease resistant can provide increased stability of the polypeptide upon oral administration, and increased bioavailability in the bloodstream following absorption.

[0352] In particular, protease sensitive sites that are normally masked by glycosylation of the polypeptide are prime targets for modification. For example, by virtue of being masked or shielded by glycosylation, such protease sensitive sites are primed for exposure to proteases upon de-shielding or unmasking of the site. Thus, these sites, upon action by glucosidases are particularly susceptible to protease attack. By modifying these sites to be resistant to proteases, the polypeptide gains an additional shield to protect against proteolytic degradation when the sugar is removed. Polypeptides having modifications at masked residues permit production of glycosylated therapeutic polypeptides that are resistant to degradation due to in vivo removal of one or more carbohydrate moieties following administration. Other protease resistant modifications, such as any described in Table 3 above for EPO, can be made at exposed or un-masked sites to provide additional protection against proteolysis. Thus, upon administration of a glycosylated protein, the modifications provided will protect the therapeutic protein from degradation in the event that the therapeutic protein is deglycosylated in vivo.

[0353] In addition, it also is contemplated that the variants provided herein provide increased protection of polypeptides that are administered as de-glycosylated or partically de-glycosylated polypeptides. For example, removal of terminal sialic acid residues by sialidases, such as neuraminidase, exposes galactose residues, which are recognized and bound by galactose-specific and other sugar-specific receptors (e.g., N-acetylglucosamine, mannose, fucose and phosphomannose) in hepatocytes that mediate removal of glycoproteins from circulation (reviewed in Ashwell and Harford (1982) Ann. Rev. Biochem. 51: 531). Thus, the clearance also can contribute to the reduced half-life of glycoproteins upon administration, in particular upon oral administration. Administration of non-glycosylated polypeptides, however, permits escape from degradation by these clearance mechanisms that normally recognize carbohydrate moieties. The ability to administer de-glycosylated polypeptides that exhibit a sufficient half-life and bioavailability for therapeutic effect also permits the use of alternative methods of protein production where effective glycosylation is not a consideration. For example, host cells such as bacteria can be used for the production of therapeutic polypeptides, which is generally more cost effective then other mammalian forms of protein production.

[0354] Further, production of glycosylated proteins in eukaryotic cells often results in a high degree of variability in the sugar residues. The heterogeneity in the group can contribute to unwanted production of antibodies when administered in vivo. Thus, the ability to administer a non-glycosylated polypeptide that has increased half-life, by virtue of modifications that increase protease resistance, also acts to increase the uniformity of the therapeutic product. The ability to produce a more uniform therapeutic product can decrease the immunogenicity of the product as well as decrease the cost of production of the therapeutic polypeptide.

[0355] Hence, provided herein are modified therapeutic polypeptides containing one or more modifications in amino acid residues normally masked by glycosylation. The modified residues are in the primary sequence of the polypeptide at residues that are normally covered due to glycosylation of the polypeptide, and contain modifications that confer protease resistance to the polypeptide by virtue of the mutation. Generally, polypeptides contain 1, 2, 3, 4 or more glycosylation sites. Hence, the one or more modification(s) is generally one modification at a residue masked by glycosylation, and if desired, further additional modifications at other residues masked by a different glycosylation at a different glycosylation site. Modified therapeutic polypeptides include those with 1, 2, 3, 4, 5, 6, 7, 8, 9, 10, 11, 12, 13, 14, 15, 16, 17, 18, 19, 20 or more modified positions, so long as at least one, generally two or more, modifications are at a residue masked by glycosylation. For example, if the polypeptide contains two modifications, one modification is at a residue masked by one glycosylation, and the second is at a residue masked by a second different glycosylation. In another example, if the polypeptide contains three modifications, one modification is at a residue masked by one glycosylation, a second is at a different residue masked by a second different glycosylation and the third is a modification at an even different residue masked by a third different glycosylation. In an additional example, if the polypeptide contains four modifications, the fourth is at a fourth residue masked by a different fourth glycosylation. It is understood, however, that sugar residues are bulky and that some residues may be masked by more then one glycosylation. Such a residue is considered to be a masked residue for either of the glycosylation sites that masks it. Exemplary modified thereapeutic polypeptides contain modification at least two masked residues (i.e. two residues masked by different glycosylations at different sites), and typically in at least three masked residues.

[0356] The therapeutic polypeptides containing one or more, generally two or more modifications at masked residues, can be modified to contain additional modifications that confer protease resistance. For example, many modifications that are identified as potential protease sensitive is-HIT positions are not masked or shielded by glycosylation. Many of these sites are exposed and thus serve as sites that are susceptible to protease degradation. Thus, additional modifications can be made at unmasked sites to render the polypeptide protease resistant. Such unmasked sites can be discovered using the same methods as described herein in Section C and also herein for discovering masked residues (except unmasked residues are those that are typically within greater than 0-25 \acute{Å} from a glycosylation site). Exemplary therapeutic polypeptide variants provided herein contain one or more, generally at least two, modifications at masked is-Hit residues that confer protease resistance, and one or more additional modification at an unmasked is-HIT site. As described herein, additional variants known in the art also can be made in the therapeutic polypeptide so long as the polypeptide exhibits increased protease resistance and retains therapeutic activity.

[0357] The resulting therapeutic polypeptides containing modifications at masked sites exhibit increased protease resistance compared to fully glycosylated, partially glycosyated and/or de-glycosylated forms of the protein not containing the modification(s). Protease resistance can be increased by an amount that is at least about or is 1%, 2%, 3%, 4%, 5%, 6%, 7%, 8%, 9%, 10%, 20%, 30%, 40%, 50%, 60%, 70%, 80%, 90%, 91%, 92%, 93%, 94%, 95%, 96%, 97%, 98%, 99%, 100%, 200%, 300%, 400%, 500%, or more compared to the half-life of the non-glycosylated, partially glycosylated or fully glycosylated unmodified therapeutic polypeptide. Since, it is contemplated that the therapeutic polypeptide will become de-glycosylated or partially glycosylated upon in vivo administration, protease resistance can be compared to therapeutic polypeptides not containing the modification(s) that similarly are de-glycosylated or partially glycosylated. For example, this can be achieved in vitro by mutating known glcosylation sites of the polypeptide such that the tested polypeptides are not capable of glycosylation upon production. The therapeutic polypeptides containing one or more masked modification also can exhibit increased protease resistance to a fully glycosylated therapeutic protein not containing the modification. In fact, therapeutic polypeptides, such as EPO, having modifications in masked residues, even when provided in an unglycosylated form exhibit increased protease resistance compared to a fully glycosylated EPO polypeptide.

[0358] The resulting variants can be produced and administered in fully glycosylated, partially glycosylated or de-glycosylated form. For example, the polypeptide variants provided herein can be provided in glycosylated form, such as by production in a system that is able to glycosylate the protein, e.g. mammalian expression systems.

[0359] If a non-glycosylated polypeptide is desired, the variants, production can be achieved by expression of the modified therapeutic polypeptide in a system that is unable to glycosylate the protein or by further modifying the therapeutic polypeptide such that the therapeutic polypeptide cannot be glycosylated. For example, the therapeutic polypeptides can be produced in a prokaryotic organism, such as a bacterium (e.g., E. coli). Such systems are described in detail elsewhere herein. The therapeutic polypeptides also can modified by one or more amino acid modifications that prevents glycosylation of the protein. For example, the therapeutic polypeptide can be modified at one or more glycosylation sites, including one or more attachment sites for glycosylation in the therapeutic polypeptide (e.g., asparagine (N) or serine (S)). In one example, the modified therapeutic polypeptide is a modified EPO polypeptide, and modified EPO polypeptide is further modified by modification at one or more of N24, N38, N83 and S126. In another example, the modified therapeutic protein is a modified EPO protein and N24, N38 and N83 are modified. In another particular example, N24, N38 and N83 residues in an EPO polypeptide are replaced with histidine (H) (e.g., SEQ ID NOS: 307 or 308). In another particular example, N24, N38 and N83 residues in an EPO polypeptide are replaced with lysine (K) (e.g., SEQ ID NOS: 309 or 310). Such modified EPO polypeptides can be employed to identifying protease sensitive sites for modification.

[0360] Generally, the resulting modified therapeutic polypeptide retains one or more therapeutic activities of the unmodified polypeptide. In some cases, removal of one or more carbohydrate moieties (either my mutation of deglycosylation sites or by actions of glycosidases in vivo) may affect an activity of the protein (e.g., an increase or decrease protein-protein interactions, such as interaction with a receptor). In such cases, additional modifications can be introduced into the therapeutic polypeptide to compensate for these effects. Such modifications are known in the art and are provided herein (e.g., exemplary amino acid modifications that can increase EPO interactions with its receptor are provided elsewhere herein).

[0361] Therapeutic polypeptides containing modifications in masked residue(s) can be administered by any route, including but not limited to orally, systemically, buccally, transdermally, intravenously, intramuscularly and subcutaneously. Typically, since masked sites have an increased susceptibility for protease digestion upon oral administration due to the abundance of glycosidases in the digestive tract, it is believed that oral administration of such modified thereapeutic polypeptides would permit a much greater half-life and bioavailability of the therapeutic polypeptide then currently exists for any orally administered therapeutic polypeptide. Hence, provided herein are methods and uses of orally administering a therapeutic polypeptide containing one or more protease resistant modification in a masked residue. It is understood, however, that the route of administration of such polypeptides is not limited to oral administration.

[0362] Thus, upon administration, the modified therapeutic proteins provided herein exhibit increased resistance to proteases where glycosylation of the therapeutic protein is either absent (e.g., production of the protein in a prokaryotic organism such as bacteria, e.g., E. coli) or removed (e.g., modification of one or more glycosylation sites or carbohydrate removal in vivo). For example, for variants provided in a glycosylated form of the therapeutic polypeptide, the modifications can protect the polypeptide from degradation if one or more carbohydrate moieties are removed from the protein in vivo following administration. These polypeptides retain sufficient activity to be therapeutically effective.

[0363] 1. Methods of Identifying Masked Residues

[0364] Methods for targeted identification and modification of protease sensitive sites in glycosylated therapeutic proteins where one or more protease sensitive sites are shielded by glycosylation are known in the art. Exemplary methods are provided herein. The methods permit the identification and modification of protease sensitive sites that are concealed by post-translational modifications, such as glycosylation.

[0365] To identify candidate protease sensitive sites for modification that are normally masked by glycosylation, first a list of all potential is-HIT positons are identified based on in silico analysis of the polypeptide. Methods to identify is-HIT positions are described herein. In one example, the algorithm PROTEOL (on-line at infobiogen.fr and at bioinfo.hku.hk/services/analyseq/cgi-bin/proteol_in.pl), can be used to provide a list of residues along the mature polypeptide, which can be recognized as substrate for proteases (blood, intestinal, etc.). This is described above in Table 2 for EPO. Similar is-HIT residues have been identified for other therapeutic polypeptides as described herein below and in related U.S. Patent Publication No. 20050202438. The algorithm generates a proteolytic digestion map based on a list of proteases, the proteolytic specificity of the proteases, and the polypeptide amino acid sequence that is entered. Selection of is-Hits that are masked by glycosylation for modification herein is based on identification of protease sensitive sites that occur within a defined distance from the carbohydrate attachment site of the native polypeptide. Typically, the protease sensitive site is located within or about 0-25 \acute{Å} of the glycosylation site. Using the three dimensional structure of the therapeutic polypeptide, potential protease sensitive sites that are within a defined distance from the glycosylation site can be identified. This is exemplified in Example 8 herein for EPO. For example, potential protease sensitive sites were identified in EPO that occur less than 10 \acute{Å} or less than 15 \acute{Å} of each glycosylation site. Replacement amino acids for modification can be identified, and can include all 19 other amino acid residues or a smaller subset. An initial list of modifications at potential protease sensitive sites (LEADs) can be generated by identification methods, such as the 2D- and 3D-scanning methods as described elsewhere herein. LEADs at sites that occur within the defined distance from the glycosylation site can be selected for testing.

[0366] For example, in order to identify modifications that increase protease resistance in the non-glycosylated therapeutic polypeptide, the therapeutic polypeptide is first modified at a glycosylation site to prevent glycosylation at the site. Generally, the glycosylation site is modified by replacement of the amino acid for attachment of the carbohydrate moiety. Typically, the replacement amino acids are chosen such that the replacement does not alter that structural integrity of the protein. For example, asparagines of N-linked glycosylation sites are generally replace with histidine or lysine.

[0367] Each selected LEAD modification is then introduced into the polypeptide with the mutant glycosylation site. Protease resistance of each modified therapeutic polypeptide is then measured using methods as described in the Examples and elsewhere herein and compared to the protease resistance of the glycosylation site mutant and/or the fully glycosylated therapeutic polypeptide. Once the modifications that confer increased protease resistance of the deglycosylated protein have been identified, the modified therapeutic protein can be generated with the protease resistance modifications alone or in combination with the glycosylation site modification. Resistance to proteolysis of the candidate LEAD polypeptides can be compared to de-glycosylated, partially de-glycosylated or fully glycosylated therapeutic proteins not containing the modification at the masked site. This is exemplified in Examples 9 herein for EPO.

[0368] Where a particular therapeutic polypeptide has multiple glycosylation sites, the steps of the method can be carried for each glycosylation site separately, simultaneously or sequentially. For example, two or more glycosylation sites can be mutated at the same time, and modifications for protease resistance can be tested on the therapeutic polypeptide containing multiple glycosylation site mutations. In another example, a first glycosylation site can be mutated in the therapeutic polypeptide and a corresponding first protease resistant mutant is identified. Then, a mutation in the second glycosylation site can be introduced in the double mutant, and a corresponding second protease resistant mutant is then identified. In another example, a first glycosylation site is mutated in the therapeutic polypeptide and a corresponding first protease resistant variant is identified. Then, a second glycosylation site can be mutated in a separate therapeutic polypeptide and a corresponding second protease resistant variant is identified. Following identification of the protease resistant variants for each glycosylation site, a modified therapeutic polypeptide can be generated that contains the modifications. In some examples, a therapeutic polypeptide is generated with both the glycosylation site mutation(s) and the modification(s) for protease resistance. In other examples, a therapeutic polypeptide is generated with only the modification(s) for protease resistance.

[0369] 2. EPO Polypeptides Containing Protease Resistant Modifications at Masked Sites

[0370] Provided herein are variant EPO polypeptides containing one or more, generally two or more, such as 2, 3 or 4 modifications at amino acid residues masked by glycosylation. As discussed above, EPO contains four glycosylation sites: three N-glycosylation sites at residues N24, N38 and N83 corresponding to residues in SEQ ID NO:2 or SEQ ID NO:237, and one O-linked glycosylation at amino acid residue S126. Any amino acid residue that is masked by a glycosylation at one or more of those glycosylation sites can be modified herein. Exemplary of such residues are described in Example 7 and include amino acid residues masked by glycosylation at N-glycosylation sites. Residues masked by glycosylation at N24 include, for example, R14, L16, L17, E18, K20, E21, E23, E31, W88, E89, P90, L91, L93, K97, F138, R139, K140, L141, F142, R143 and Y145. For example, exemplary protease resistant modification at residues masked by N24 include, but are not limited to, R14H, R14Q, L16I, L16V, L17I, L17V, E18Q, E18H, E18N, K20Q, K20T, K20N, E21Q, E21H, E21N, E23Q, E23H, E31Q, E31H, W88S, W88H, E89Q, E89H, P90S, P90A, L91I, L91V, L93V, L93I, K97Q, K97T, F138I, F138V, R139H, R139Q, K140N, K140Q, L141I, L141V, F142I, F142V, R143H, R143Q, Y145H and Y145I. Residues masked by glycosylation at N38 include, for example, L35, E37, P42, D43, L69, L70, E72, L75, R76, L80, L81, P129, L130, R131, D136, F138, R139, K140, L141 and F142. For example, exemplary protease resistant modification at residues masked by N38 include, but are not limited to, L35V, L35I, E37Q, E37H, P42S, P42A, D43Q, D43H, L69V, L69I, L70I, L70V, E72Q, E72H, L75V, L75I, R76H, R76Q, L80V, L80I, L81I, L81V, P129S, P129A, L130V, L130I, R131H, R131Q, D136Q, D136H, D136N, F138I, F138V, R139H, R139Q, K140N, K140Q, L141I, L141V, F142I and F142V. Residues masked by glycosylation at N83 include, for example, L35, E37, E72, L75, R76, L80, L81, P87, W88, P90, L91, L93 and D96. For example, exemplary protease resistant modification at residues masked by glycosylation at N83 include, but are not limited to, L35V, L35I, E37Q, E37H, E72Q, E72H, L75V, L75I, R76H, R76Q, L80V, L80I, P87S, P87A, W88S, W88H, P90S, P90A, L91I, L91V, L93V, L93I, D96Q and D96H. Residues masked by glycosylation at S126 include, for example, L69, E72, P121, P122, D123, P129, L130, P42, E62, W64, L67, L70, L75, R76 and R131. For example, exemplary protease resistant modification at residues masked by glycosylation at S126 include, but are not limited to, L69V, L69I, E72Q, E72H, P121S, P121A, P122S, P122A, D123H, D123N, P129S, P129A, L130V, L130I, P42S, P42A, E62Q, E62H, W64S, W64H, L67I, L67V, L70I, L70V, L75V, L75I, R76H, R76Q, R131H and R131Q.

[0371] Exemplary of modification masked by glycosylation at N24 includes, for example, K20Q, P90S, L93I, L93V, R139H, R139Q, R143H and R143Q, in particular modification masked by glycosylation at N24 includes R139H, K20Q, L93I and L93V. Exemplary of modification masked by glycosylation at N38 includes, for example, L80I, L130I, R131H, R131Q, D136N, R139H and R139Q, in particular modification masked by glycosylation at N38 includes R139H and L80I. Exemplary of modification masked by glycosylation at N83 includes, for example, L80I, D90S, and D96Q, in particular modification masked by glycosylation at N83 includes L80I. Exemplary of modification masked by glycosylation at S126 includes, for example, D123N, L130I, R131H and R131Q.

[0372] Thus, an EPO variant containing one or more modification(s) at masked residues includes a polypeptide containing a modification at a residue masked by glycosylation at N24, a residue masked by glycosylation of N38, a residue masked by glycosylation of N83, a residue masked by glycosylation at S126 or any combination thereof. Hence, an EPO variant provided herein containing modification(s) at masked sites includes one containing one modification at a site masked by N24, N38 or N83 alone; containing two modifications masked by N24/N38; N24/N83; or N38/N83; or containing three modifications masked by N24/N38/N83. Further a modified EPO can contain a modification at a residue masked by glcosylation at S126 either alone or in combination with any one or modification masked by glycosylation at N24, N38 or NN83. In some examples, a modified EPO contains modifications at masked sites that contain two or more modifications masked by the same site. Generally, a modified EPO contains two or more modifications where at least two of the modifications are at residues masked by different glycosylation sites. For example, modifications of an EPO polypeptide at masked residues includes one or more modification at N24 that is R139H, K20Q, L93I and L93V; one or more modification at N38 that is R139H and L80I; and/or one or more modification at N83 that is L80I. Exemplary modifications are set forth in Table 5 below. As discussed below, the modifications also can be made in a backbone that contains one or more modifications to de-glycosylate the polypeptide at positions N24, N38 or N83. For example, fully de-glycosylated polypeptides can be provided with modifications at each of these sites (e.g., N24H, N38H or N38H). SEQ ID NOS for fully de-glycosylated (NH3) variants also are provided in Table 5 below.

TABLE 5

| | | SEQ ID |
|---|---|---|
| | | NO |
| | SEQ ID | (NH3 |
| EPO Masked Variant | NO | variant) |
| R139H | 186 | 344 |
| L93I | 76 | 346 |
| K20Q/R139H | 351 | 352 |
| K20Q/R139H/L93I | 367 | 368 |
| L80I/R139H/L93I | 371 | 372 |
| K20Q/R139H/L80I | 373 | 374 |
| K20Q/R139H/L93V | 383 | 384 |
| K20Q/L80I/R139H/L93I | 401 | 402 |
| R139H/L80I | 417 | 418 |
| R139H/L93V | 419 | 420 |
| R139H/L93I | 421 | 422 |
| K20Q | 19 | 423 |
| K20Q/L93I | 432 | 433 |
| L80I | 66 | 484 |
| L93V | 75 | 485 |
| K20Q/L80I | 486 | 487 |
| K20Q/L93V | 488 | 489 |

[0373] Any of the above modifications can be in an unmodified EPO polypeptide, such as an EPO having a sequence of amino acids set forth in SEQ ID NO: 2 or 237, or in allelic or species variant or other variant of a mature human EPO polypeptide having at least or at least about 60%, 70%, 75%, 80%, 85%, 90%, 91%, 92%, 93%, 94%, 95%, 96%, 97%, 98%, 99%, or more sequence identity to a mature human EPO polypeptide set forth in SEQ ID NO: 2 or 237. The EPO polypeptides include those that are 166 amino acids in length as set forth in any of SEQ ID NOS: 186, 76, 351, 367, 371, 373, 383, 401, 417, 419, 421, 19, 432, 66, 75, 486 and 488, and also include those set forth in any of SEQ ID NOS: 186, 76, 351, 367, 371, 373, 383, 401, 417, 419, 421, 19, 432, 66, 75, 486 and 488 that are active fragments thereof so long as the active fragments contain the modification. For example, EPO polypeptides include those that are 165 amino acids in length and that lack the C-terminal arginine in any of SEQ ID NOS: 186, 76, 351, 367, 371, 373, 383, 401, 417, 419, 421, 19, 432, 66, 75, 486 and 488.

[0374] Any of the EPO polypeptide variants provided herein that contain one or modifications at masked residues that confer protease resistance also can further contain one or more modifications at un-masked residues that confer protease resistance. Such residues include any residue that is not within 0-25 \acute{Å} from a glycosylation site. Among the is-Hits identified in Section B above, un-masked residues include, but are not limited to is-Hit residues: P2, P3, R4, L5, C7, D8, R10, L12, E13, Y15, C29, K45, F48, Y49, W51, K52, R53, M54, E55, L102, R103, L105, L108, L109, R110, L112, K116, E117, F148, L149, R150, K152, L153, K154, L155, Y156, E159, R162, D165, and R166. Exemplary of protease resistant modifications at the above un-masked is-Hit residues, include, but are not limited to, P2A, P3S, P3A, R4H, R4Q, L5I, L5V, C7S, C7V, C7A, C7I, C7T, D8Q, D8H, D8N, R10H, R10Q, L12V, L12I, E13Q, E13H, E13N, Y15H, Y151, C29S, C29V, C29A, C29I, C29T, K45Q, K45T, K45N, F48I, F48V, Y49H, Y49I, W51S, W51H, K52Q, K52T, K52N, R53H, R53Q, M54V, M54I, E55Q, E55H, E55N, E62N, L102V, L102I, R103H, R103Q, L105I, L105V, L108I, L108V, L109I, L109V, R110H, R110Q, L112V, L112I, K116Q, K116T, K116N, E117Q, E117H, E117N, D123Q, F148I, F148V, L1491, L149V, R150H, R150Q, K152Q, K152T, K152N, L153I, L153V, K154Q, K154T, K154N, L155V, L155I, Y156H, Y156I, E159Q, E159H, E159N, R162H, R162Q, D165Q, D165H, D165N, R166H, and R166Q. In particular, exemplary un-masked modification that can be combined with one or more masked modifications include R4H; F48I; K52Q; K116T; R150H; E159N; K116N; K45N; K52N; D165Q; D165H; D165N; R166H; and L153V, in particular R4H, K52N, L153V and E159N. Exemplary of such variants are set forth in Table 6 below. As discussed below, the modifications also can be made in a backbone that contains one or more modifications to de-glycosylate the polypeptide at positions N24, N38 or N83. For example, fully or partially de-glycosylated polypeptides can be provided with modifications one or more of these sites (e.g., one or more of N24H, N38H or N38H). SEQ ID NOS for fully or partially de-glycosylated (NH3) variants also are provided in Table 6 below.

TABLE 6

| | | SEQ ID |
|---|---|---|
| | | NO |
| EPO Masked + un-Masked | SEQ ID | (NH3 |
| Variant | NO | variant) |
| R139H/R4H | 314 | 345 |
| R139H/K52N | 353 | 354 |
| R139H/L153V | 355 | 356 |
| R139H/E159N | 357 | 358 |
| K20Q/R139H/R4H | 359 | 360 |
| K20Q/R139H/K52N | 361 | 362 |
| K20Q/R139H/L153V | 363 | 364 |
| K20Q/R139H/E159N | 365 | 366 |
| L80I/R139H/R4H | 369 | 370 |
| L80I/R139H/E159N | 375 | 376 |
| L80I/R139H/K52N | 377 | 378 |
| L80I/R139H/L153V | 379 | 380 |
| L93V/R139H/R4H | 381 | 382 |
| L93V/R139H/E159N | 385 | 386 |
| L93V/R139H/K52N | 387 | 388 |
| L93V/R139H/L153V | 389 | 390 |
| R4H/K20Q/L93I/R139H | 391 | 392 |
| K20Q/L93I/R139H/E159N | 393 | 394 |
| K20Q/L93I/R139H/K52N | 395 | 396 |
| K20Q/L93I/R139H/L153V | 397 | 398 |
| R4H/K20Q/L80I/R139H | 399 | 400 |
| K20Q/L80I/R139H/E159N | 403 | 404 |
| K20Q/K52N/80I/R139H | 405 | 406 |
| K20Q/L80I/R139H/L153V | 407 | 408 |
| K20Q/L93V/R139H/R4H | 409 | 410 |
| K20Q/L93V/R139H/E159N | 411 | 412 |
| K20Q/L93V/R139H/K52N | 413 | 414 |
| K20Q/L93V/R139H/L153V | 415 | 416 |
| L93I/R139H/E159N | 424 | 425 |
| L93I/R139H/K52N | 426 | 427 |
| L93I/R139H/L153V | 428 | 429 |
| L93I/R139H/R4H | 430 | 431 |
| K20Q/L153V | 434 | 435 |
| K20Q/E159N | 436 | 437 |
| K20Q/R4H | 438 | 439 |
| | (413) | |
| K20Q/K52N | 440 | 441 |
| K20Q/L80I/R139H/E159N/R4H | 442 | 443 |
| K20Q/L80I/R139H/E159N/K52N | 444 | 445 |
| K20Q/L80I/R139H/L153V/E159N | 446 | 447 |
| K20Q/L80I/R139H/E159N/L93I | 448 | 449 |
| K20Q/L80I/R139H/L153V/R4H | 450 | 451 |
| K20Q/K52N/L80I/R139H/L153V | 452 | 453 |
| K20Q/L80I/R139H/L153V/L93I | 454 | 455 |
| K20Q/R139H/E159N/R4H | 456 | 457 |
| K20Q/R139H/E159N/K52N | 458 | 459 |
| K20Q/R139H/E159N/L153V | 460 | 461 |
| K20Q/L93I/R139H/E159N/R4H | 462 | 463 |
| K20Q/L93I/R139H/E159N/K52N | 464 | 465 |
| K20Q/L93I/R139H/E159N/L153V | 466 | 467 |
| R4H/K20Q/K52N/L80I/R139H | 468 | 469 |
| R4H/K20Q/L80I/R139H/L93I | 470 | 471 |
| K20Q/R139H/L153V/R4H | 472 | 473 |
| K20Q/R139H/K52N/L153V | 474 | 475 |
| R4H/K20Q/L93I/R139H/K52N | 476 | 477 |
| R4H/K20Q/L93I/R139H/L153V | 478 | 479 |
| K20Q/L93V/R139H/E159N/R4H | 480 | 481 |
| K20Q/L93V/R139H/E159N/K52N | 482 | 483 |
| K20Q/R139H/R4H/K52N | 490 | 491 |

[0375] Any of the above modifications can be in an unmodified EPO polypeptide, such as an EPO having a sequence of amino acids set forth in SEQ ID NO: 2 or 237, or in allelic or species variant or other variant of a mature human EPO polypeptide having at least or at least about 60%, 70%, 75%, 80%, 85%, 90%, 91%, 92%, 93%, 94%, 95%, 96%, 97%, 98%, 99%, or more sequence identity to a mature human EPO polypeptide set forth in SEQ ID NO: 2 or 237. The EPO polypeptides include those that are 166 amino acids in length as set forth in any of SEQ ID NOS: 314, 353, 355, 357, 359, 361, 363, 365, 369, 375, 377, 379, 381, 385, 387, 389, 391, 393, 395, 397, 399, 403, 405, 407, 409, 411, 413, 415, 424, 426, 428, 430, 434, 436, 438, 440, 442, 444, 446, 448, 450, 452, 454, 456, 458, 460, 462, 464, 466, 468, 470, 472, 474, 476, 478, 480, 482, and 490 and also include those set forth in any of SEQ ID NOS: 314, 353, 355, 357, 359, 361, 363, 365, 369, 375, 377, 379, 381, 385, 387, 389, 391, 393, 395, 397, 399, 403, 405, 407, 409, 411, 413, 415, 424, 426, 428, 430, 434, 436, 438, 440, 442, 444, 446, 448, 450, 452, 454, 456, 458, 460, 462, 464, 466, 468, 470, 472, 474, 476, 478, 480, 482, and 490 that are active fragments thereof so long as the active fragments contain the modification. For example, EPO polypeptides include those that are 165 amino acids in length and that lack the C-terminal arginine in any of SEQ ID NOS: 314, 353, 355, 357, 359, 361, 363, 365, 369, 375, 377, 379, 381, 385, 387, 389, 391, 393, 395, 397, 399, 403, 405, 407, 409, 411, 413, 415, 424, 426, 428, 430, 434, 436, 438, 440, 442, 444, 446, 448, 450, 452, 454, 456, 458, 460, 462, 464, 466, 468, 470, 472, 474, 476, 478, 480, 482, and 490.

[0376] As discussed herein, one of the advantages of modifying a therapeutic polypeptide, such as EPO, at residues that are normally masked by glycosylation of the polypeptide is that, when the protein is de-glycosylated or partially de-glycosylated, such residues are prime for protease attack. Thus, modification of masked is-HIT residues provide increased protease resistance when the polypeptide is de-glycosylated either by glucosidases or provided as a de-glycosylated polypeptide. This permits such therapeutic polypeptides to be produced in non-mammalian cells, such as bacteria, which often is a cheaper and more efficient production system for polypeptides. One of the problems, however, in producing EPO in bacteria is that it can aggregate, which is particularly associated with residues N24, N38 and N83. Thus, in an effort to degrease aggregation of E. coli-derived EPO, N-glycosylation site residues N24, N38 and N83 can be mutated to basis residues (such as lysine or histidine) to provide improved stability of the polypeptide (Narhi et al. (2001) Protein Eng., 14:135-140). Accordingly, any of the modified EPO polypeptides provided herein that contain at least one modification at a masked is-HIT residue can contain one or more further modifications at any of N24, N38 or N83 (e.g. modifications N24K, N24H, N38K, N38H, N83K or N83H). Such exemplary EPO polypeptides are set forth Tables 5 and 6 above and in any of SEQ ID NOS: 344-346, 352, 354, 356, 358, 360, 362, 364, 366, 368, 370, 372, 374, 376, 378, 380, 382, 384, 386, 388, 390, 392, 394, 396, 398, 400, 402, 404, 406, 408, 410, 412, 414, 416, 418, 420, 422, 423, 425, 427, 429, 431, 433, 435, 437, 439, 441, 443, 445, 447, 449, 451, 453, 455, 457, 459, 461, 463, 465, 467, 469, 471, 473, 475, 477, 479, 481, 483, 484, 485, 487, 489 and 491, or fragments thereof, such as in a 165 amino acid polypeptide lacking the C-terminal arginine.

[0377] 3. Other Therapeutic Polypeptides Containing Protease Resistant Modifications at Masked Sites

[0378] Any therapeutic polypeptide that contains glycosylation sites and is normally glycosylated in vivo can be modified by mutation of residues that are masked by the glycosylation sites. The masked residues to be modified are those that are identified as is-Hits and are susceptible to protease degradation. Modification of such protease sensitive is-Hit positions by addition, substitution or replacement of the amino acid residue can result in a polypeptide that is protease resistant to proteases in vitro or in vivo (e.g., in the serum, blood, digestive tract). As described above, masked residues are contemplated herein to be sites that are particularly susceptible to protease attack when the protein is provided in de-glycosylated form, or when it is administered in glycosylated form and becomes de-glycosylated or partially glycosidated by actions of glucosidases, particularly upon oral administration by action of such enzymes in the digestive tract.

[0379] One of skill in the art can use any method to identify residues that are masked by glycosylation, for example, any of the methods described herein. For example, is-Hit positions that are identified as susceptible to protease degradation and are within 0-25 \acute{Å} of a glycosylation site can be identified as masked is-Hit residues for modification herein. As discussed above, therapeutic polypeptides can contain 1, 2, 3, 4, 5, 6, 7, 8, 9, 10, 11, 12, 13, 14, 15, 16, 17, 18, 19, 20 or more modifications, so long as at least one, generally two modifications are at is-Hit residues masked by glycosylation. Additional modifications at exposed or un-masked is-Hit residues (i.e. those residues that are not within 0-25 \acute{Å} of a glycosylation site) can also be included to confer increased protection against protease digestion. Further, modified therapeutic polypeptides provided herein also can contain any other mutation known in the art.

[0380] Exemplary glycosylated therapeutic polypeptides include, but are not limited to, hormones (e.g., insulin, thyroid hormone, catecholamines, gonadotrophines, trophic hormones, prolactin, oxytocin, dopamine, bovine somatotropin or leptins), growth hormones (e.g., human growth hormone), growth factors (e.g., epidermal growth factor, nerve growth factor or insulin-like growth factor), growth factor receptors, cytokines and immune system proteins (e.g., interleukins, colony stimulating factor (CSF), granulocyte colony stimulating factor (G-CSF), granulocyte-macrophage colony stimulating factor (GM-CSF), tumor necrosis factor (TNF), interferons such as IFNα, IFNβ, or IFNγ, erythropoietin, integrins, addressins, selectins, homing receptors, T cell receptors, immunoglobulins, soluble major histocompatability complex antigens, immunologically active antigens such as bacterial, parasitic, or viral antigens or allergens or autoantigens, enzymes (e.g., tissue plasminogen activator, streptokinase, cholesterol biosynthetic or degradative enzymes, steroidogenic enzymes, kinases, phosphodiesterases, methylases, de-methylases, dehydrogenases, cellulases, proteases, lipases, phospholipases, aromatases, cytochromes, adenylate or guanylate cyclases and neuramidases), receptors (e.g., steroid hormone receptors or peptide receptors), binding proteins (e.g., steroid binding proteins, growth hormone or growth factor binding proteins), transcription and translation factors, oncoproteins or proto-oncoproteins (e.g., cell cycle proteins), muscle proteins (e.g., myosin or tropomyosin), myeloproteins, neuroactive proteins, tumor growth suppressing proteins (e.g., angiostatin or endostatin), anti-sepsis proteins (e.g., bactericidal permeability-increasing protein), structural proteins (e.g., collagen, fibroin, fibrinogen, elastin, tubulin, actin or myosin), blood proteins (e.g., thrombin, serum albumin, Factor VII, Factor VIII, insulin, Factor IX, Factor X, tissue plasminogen activator, Protein C, von Willebrand factor, antithrombin, glucocerebrosidase, granulocyte colony stimulating factor (GCSF) or modified Factor VIII, anticoagulants, such as huridin).

[0381] Exemplary of modified therapeutic polypeptides are cytokines. Exemplary cytokine families that contain glycosylated cytokines include interferons, interleukins, hematopoietins and chemokines. Exemplary glycosylated cytokines include, but are not limited to, erythropoietin (EPO), thrombopoietin (TPO), granulocyte-colony stimulating factor (G-CSF), granulocyte macrophage-colony stimulating factor (GM-CSF), macrophage-colony stimulating factor (M-CSF), leukemia inhibitory factor (LIF), IL-1 beta, IL-2, IL-3, IL-4, IL-5, IL-6, IL-9, OSM, stem cell factor (SCF), IFN-β, IFN-γ and vascular endothelial growth factor (VEGF).

[0382] a. GM-CSF

[0383] Granulocyte-macrophage colony-stimulating factor (GM-CSF) is a glycoprotein produced by a variety of cells including, but not limited to, lymphocytes, endothelial cells, mast cells, fibroblasts, monocytes and some malignant cells. The GM-CSF gene encodes a 144 amino acid precursor protein (SEQ ID NO:273) which includes a 17 amino acid signal peptide. Post-translational processing results in a glycosylated mature GM-CSF protein that is 127 amino acids long (SEQ ID NO:274). The mature GM-CSF is N-glycosylated at two sites, corresponding to N27 and N37 of the mature GM-CSF sequence set forth in SEQ ID NO:274 and N44 and N54 of the precursor polypeptide set forth in SEQ ID NO:273. There also are four O-glycosylation sites located at the N-terminus of the mature protein, at amino acid positions S5, S7, S9 and T10 of the sequence set forth in SEQ ID NO:274 (corresponding to S22, S24, S26 and T27 of the precursor polypeptide set forth in SEQ ID NO:273). GM-CSF is a multilineage colony-stimulating factor that can stimulate the proliferation and differentiation of hematopoietic progenitor cells of neutrophil, eosinophil and monocyte origin. As such, it can be used therapeutically in, for example, myeloid reconstitution following bone marrow transplant or bone marrow transplant engraftment failure or delay, following transplantation of autologous peripheral blood progenitor cells, and following induction chemotherapy in older adults with acute myelogenous leukemia.

[0384] Provided herein are modified GM-CSF polypeptides that exhibit increased resistance to proteolysis compared to an un-modified GM-CSF polypeptide by virtue of one or more modifications at is-Hit residue(s) masked by glycosylation at glycosylation sites N27, N37, S5, S7, S9 or T10. The modified GM-CSF polypeptides provided herein can further contain additional modifications at un-masked or exposed is-Hit positions. Exemplary is-Hit positions conferring protease resistant and the replacement amino acids are set forth in Table 7 below. These include masked and un-masked is-Hit residues. One of skill in the art, such as by using the methods described herein, can identify those is-Hit residues that are masked by glycosylation. Modified GM-CSF polypeptides provided herein can further contain any other modification in a GM-CSF known in the art, so long as the polypeptide contains at least one modification, generally two modifications, at a masked is-Hit position and retains activity of the GM-CSF polypeptide.

[0385] The modified GM-CSF polypeptides provided herein can be produced as a glycosylated, partially glycosylated or de-glycosylated polypeptide. For example, a de-glycosylated polypeptide can be produced using a prokaryotic expression system, such as expression systems using E. coli as the host cells. In other examples, protease-resistant GM-CSF polypeptides can be produced as non-glycosylated proteins by modification of one or more glycosylation sites. For example, modification at one or both of amino acid positions N27 and N37 of a mature GM-CSF polypeptide (SEQ ID NO:274) can result in a non-glycosylated protein. The modified GM-CSF polypeptides provided herein retain activity of a fully glycosylated GM-CSF polypeptide that is not protease-resistant. The protease-resistant GM-CSF polypeptides, therefore, can be used to treat conditions and diseases normally treated by GM-CSF, including, but not limited to, reconstitution of neutrophils and monocytes following chemotherapy or bone marrow transplantation.

TABLE 7
GM-CSF Modifications to Increase Resistance to Proteolysis

| | | | | |
|---|---|---|---|---|
| E38N | E38Q | E38H | E41N | E41Q |
| E41H | E45N | E45Q | E45H | M46I |
| M46V | D48N | D48Q | L49I | L49V |
| E51N | E51Q | E51H | E60N | E60Q |
| E60H | K63N | K63Q | P92A | P92S |
| E93N | E93Q | E93H | F119I | F119V |
| D120N | D120Q | E123N | E123Q | E123H |
| P124A | P124S | | | |

[0386] b. M-CSF

[0387] M-CSF is a glycosylated cytokine produced by a variety of cells including lymphocytes, monocytes, fibroblasts, endothelial cells, myoblasts and osteoblasts. As a result of differential splicing, the M-CSF gene produces three different isoforms. Isoform 1 is expressed as a 554 amino acid precursor (SEQ ID NO:275), including a 32 amino acid signal sequence. The mature isoform 1 M-CSF protein is 522 amino acids long and set forth in SEQ ID NO:276). Isoform 2 is expressed as a 438 amino acid precursor (SEQ ID NO:277), including a 32 amino acid signal sequence. The mature isoform 2 M-CSF protein is 406 amino acids long and set forth in SEQ ID NO:278). Isoform 3 is expressed as a 256 amino acid precursor (SEQ ID NO:279), including a 32 amino acid signal sequence. The mature isoform 3 M-CSF protein is 224 amino acids long and set forth in SEQ ID NO:280). M-CSF has two N-glycosylation sites (corresponding to amino acid residues 154 and 172 of the precursor polypeptide set forth in each of SEQ ID NOS: 275, 277 and 279, and amino acids 122 and 140 of the mature polypeptides set forth in each of SEQ ID NOS: 276, 278 and 280). M-CSF is a key regulator of cellular proliferation, differentiation, and survival of blood monocytes, tissue macrophages and their progenitor cells. M-CSF also has been shown to play important roles in modulating dermal thickness, and male and female fertility.

[0388] Provided herein are modified M-CSF polypeptides that exhibit increased resistance to proteolysis compared to an un-modified M-CSF polypeptide by virtue of one or more modifications at an is-Hit residue masked by glycosylation at glycosylation sites N122 and N140. The modified M-CSF polypeptides provided herein can further contain additional modifications at un-masked or exposed is-Hit positions. Is-Hit positions susceptible to protease degradation can be identified using the methods described in U.S. Patent Publication No. 20050202438. One of skill in the art, such as by using the methods described herein, can identify those is-Hit residues that are masked by glycosylation. Modified M-CSF polypeptides provided herein can further contain any other modification in an M-CSF known in the art, so long as the polypeptide contains at least one modification, generally two modifications, at a masked is-Hit position and retains activity of the M-CSF polypeptide.

[0389] The modified M-CSF polypeptides provided herein can be produced as a glycosylated, partially glycosylated or de-glycosylated polypeptide. In one example, non-glycosylated protease-resistant M-CSF cytokines can be generated by production of protease-resistant polypeptides in host cells that are incapable of glycosylation, including, for example, prokaryotic hosts such as E. coli. In another example, non-glycosylated protease-resistant M-CSF cytokines can be generated by mutations of one or more, up to all, of the glycosylation sites in the polypeptide. For example, a protease-resistant polypeptide having one or more modifications that increase resistance to proteolysis can further include modification of one or more amino acid positions N122 and/or N140. The modified M-CSF polypeptides provided herein retain activity of a fully glycosylated M-CSF polypeptide that is not modified to be protease-resistant. Such modified protease-resistant polypeptides can be used in the treatment of diseases or disorders for which M-CSF is normally used to treat. Exemplary of such diseases or disorders include, but are not limited to, malignancies, including hematopoietic recovery after bone marrow transplantation, atherosclerosis and fungal infection.

[0390] c. G-CSF

[0391] Exemplary of glycosylated cytokines is granulocyte colony-stimulating factor (G-CSF). G-CSF is produced by monocytes, macrophages, neutrophils, fibroblasts and endothelial cells as a 207 amino acid precursor polypeptide (SEQ ID NO:281) with a 30 amino acid signal sequence. The 177 amino acid mature protein, set forth in SEQ ID NO:282, is produced following cleavage of the signal sequence. Differential splicing of G-CSF mRNA can result in another precursor variant, isoform b, which is 204 amino acids in length (SEQ ID NO: 283). Cleavage of the signal peptide results in a 174 amino acid mature isoform b G-CSF polypeptide (SEQ ID NO:284). G-CSF is O-linked glycosylated at amino acid T136 of the mature polypeptide set forth in SEQ ID NO:282 (corresponding to T166 of the precursor polypeptide set forth in SEQ ID NO:281; T133 of the mature isoform b polypeptide set forth in SEQ ID NO:284; T163 of the precursor isoform b polypeptide set forth in SEQ ID NO:283). Granulocyte colony stimulating factor (G-CSF) is the primary extracellular regulator of granulopoiesis and regulates the production of neutrophils by stimulating proliferation and survival of specific bone marrow precursor cells and their differentiation into granulocytes.

[0392] Provided herein are modified G-CSF polypeptides that exhibit increased resistance to proteolysis compared to an un-modified G-CSF polypeptide by virtue of one or more modifications at an is-Hit residue masked by glycosylation at glycosylation sites T136. The modified G-CSF polypeptides provided herein can further contain additional modifications at un-masked or exposed is-Hit positions. Is-Hit positions susceptible to protease degradation can be identified using the methods described in U.S. Patent Publication No. 20050202438. Exemplary is-Hit positions conferring protease resistant and the replacement amino acids are set forth in Table 8 below. These include masked and un-masked is-Hit residues. One of skill in the art, such as by using the methods described herein, can identify those is-Hit residues that are masked by glycosylation. Modified G-CSF polypeptides provided herein can further contain any other modification in a G-CSF known in the art, so long as the polypeptide contains at least one modification, at a masked is-Hit position and retains activity of the G-CSF polypeptide.

[0393] The modified G-CSF polypeptides provided herein can be produced as a glycosylated, partially glycosylated or de-glycosylated polypeptide. In one example, modified G-CSF polypeptides provided herein can be generated by production of protease-resistant polypeptides in host cells that are incapable of glycosylation, including, for example, prokaryotic hosts such as E. coli. In another example, modified G-CSF polypeptides can be generated by mutations of the O-glycosylation site in the polypeptide. For example, a protease-resistant polypeptide having one or more modifications, where at least one is at a masked is-Hit residue among modifications set forth in Table 8 corresponding to amino acid replacements in SEQ ID NO:282 can further include modification of amino acid position T136. The modified protease-resistant polypeptides provided herein retain activity of a fully glycosylated G-CSF polypeptide that does not contain the modification. Such protease-resistant polypeptides can be used in the treatment of diseases or disorders for which G-CSF is normally used to treat. Exemplary of such diseases or disorders include, but are not limited to, Crohn's disease, cardiac disease, acquired neutropenias, such as that induced by chemotherapy, congenital neutropenias and asthma.

TABLE 8
G-CSF Modifications to Increase Resistance to Proteolysis

| | | | | |
|---|---|---|---|---|
| W61S | W61H | P63A | P63S | P68A |
| P68S | L72I | L72V | F86I | F86V |
| E96N | E96Q | E96H | P100A | P100S |
| E101N | E101Q | E101H | P131A | P131S |
| L133I | L133V | P135A | P135S | F147I |
| F147V | R169H | R169Q | R172H | R172Q |
| P177A | P177S | | | |

[0394] d. LIF

[0395] Leukemia inhibitory factor (LIF) is a glycoprotein. The LIF gene encodes a 202 amino acid precursor protein (SEQ ID NO:285) that includes a 22 amino acid signal peptide. Post-translational processing results in a glycosylated mature LIF protein that is 180 amino acids long (SEQ ID NO:286). The mature LIF contains multiple N-glycosylated sites, corresponding to N7, N34, N63, N73, N96 and N116 of the mature LIF sequence set forth in SEQ ID NO:286 (N31, N56, N85, N95, N118 and N138 of the precursor polypeptide set forth in SEQ ID NO:285). LIF has a wide array of actions, including acting as a stimulus for platelet formation, proliferation of some hematopoietic cells, bone formation, adipocyte lipid transport, adrenocorticotropic hormone production, neuronal survival and formation, muscle satellite cell proliferation, and acute phase production by hepatocytes. LIF is essential for blastocyst implantation and the normal development of hippocampal and olfactory receptor neurons.

[0396] Provided herein are modified LIF polypeptides that exhibit increased resistance to proteolysis compared to an un-modified LIF polypeptide by virtue of one or more modifications at an is-Hit residue masked by glycosylation at glycosylation sites N7, N34, N63, N73, N96 and N116. The modified LIF polypeptides provided herein can further contain additional modifications at un-masked or exposed is-Hit positions. Is-Hit positions susceptible to protease degradation can be identified using the methods described in U.S. Patent Publication No. 20050202438. Exemplary is-Hit positions conferring protease resistant and the replacement amino acids are set forth in Table 9 below. These include masked and un-masked is-Hit residues. One of skill in the art, such as by using the methods described herein, can identify those is-Hit residues that are masked by glycosylation. Modified LIF polypeptides provided herein can further contain any other modification in an LIF known in the art, so long as the polypeptide contains at least one modification, generally two modifications, at a masked is-Hit position and retains activity of the LIF polypeptide.

[0397] The modified LIF polypeptides provided herein can be produced as a glycosylated, partially glycosylated or de-glycosylated polypeptide. For example, the non-glycosylated modified LIF polypeptides provided herein can be produced using a prokaryotic expression system, such as expression systems using E. coli as the host cells. In other examples, modified LIF polypeptides can be produced as non-glycosylated proteins by modification of one or more glycosylation sites. For example, modification at one or both of amino acid positions N7, N34, N63, N73, N96 and N116 of a mature LIF polypeptide (SEQ ID NO:286) can result in a non-glycosylated protein. The modified LIF polypeptides provided herein retain activity of a fully glycosylated LIF polypeptide that does not contain the modifications. The modified LIF polypeptides, therefore, can be used to treat conditions and diseases normally treated by LIF, including, but not limited to, reconstitution of neutrophils and monocytes following chemotherapy or bone marrow transplantation.

TABLE 9
Leukemia Inhibitory Factor (LIF)
Modifications to Increase Resistance to Proteolysis

| | | | | |
|---|---|---|---|---|
| P69A | P69S | F70I | F70V | R85H |
| R85Q | R99H | R99Q | K102N | K102Q |
| L104I | L104V | P106A | P106S | L109I |
| L109V | Y137H | Y137I | D143N | D143Q |
| Y146H | Y146I | P148A | P148S | D149N |
| D149Q | K153N | K153Q | D154N | D154Q |
| F156I | F156V | | | |

[0398] e. Interleukin 1β

[0399] Interleukin 1β (IL-1β) is synthesized as a precursor of 268 amino acids (SEQ ID NO:287), including a 116 amino acid propeptide. The sequence of mature IL-1β is set forth in SEQ ID NO:288 and is 152 amino acids in length. IL-1β has one N-linked glycosylation site, corresponding to amino 123 of the precursor polypeptide set forth in SEQ ID NO:287 and amino acid 7 of the mature polypeptide set forth in SEQ ID NO:288). IL-1β is a proinflammatory cytokine produced in a variety of cells including monocytes, tissue macrophages, keratinocytes and other epithelial cells. Both IL-1 alpha and IL-1β bind to the same receptor and have similar if not identical biological properties. These cytokines have a broad range of activities including, stimulation of thymocyte proliferation, by inducing IL-2 release, B-cell maturation and proliferation, mitogenic FGF-like activity and the ability to stimulate the release of prostaglandin and collagenase from synovial cells.

[0400] Provided herein are modified IL-1β polypeptides that exhibit increased resistance to proteolysis compared to an un-modified IL-1β polypeptide by virtue of one or more modifications at an is-Hit residue masked by glycosylation at glycosylation sites N7. The modified IL-1β polypeptides provided herein can further contain additional modifications at un-masked or exposed is-Hit positions. Is-Hit positions susceptible to protease degradation can be identified using the methods described in U.S. Patent Publication No. 20050202438. One of skill in the art, such as by using the methods described herein, can identify those is-Hit residues that are masked by glycosylation. Modified IL-1β polypeptides provided herein can further contain any other modification in an IL-1β known in the art, so long as the polypeptide contains at least one modification, generally two modifications, at a masked is-Hit position and retains activity of the IL-1β polypeptide.

[0401] The modified IL-1β polypeptides provided herein can be produced as a glycosylated, partially glycosylated or de-glycosylated polypeptide. In one example, modified IL-1β polypeptides can be generated by production of protease-resistant polypeptides in host cells that are incapable of glycosylation, including, for example, prokaryotic hosts such as E. coli. In another example, non-glycosylated protease-resistant IL-1β cytokines can be generated by mutations of one or more, up to all, of the glycosylation sites in the polypeptide. For example, a protease-resistant polypeptide having one or more modifications, where at least one is a modification at a masked is-HIT residue, that increase protease-resistance corresponding to amino acid replacements in SEQ ID NO:288 can further include modification of amino acid positions N7. The modified IL-1β polypeptides provided herein retain activity of a fully glycosylated IL-1β polypeptide that does not contain the modification. Such modified IL-1β polypeptides can be used in the treatment of diseases or disorders for which IL-1β is normally used to treat. Exemplary of such diseases or disorders include, but are not limited to, cancers, including use of IL-1β to restore the immune system following chemotherapy, ischemia/reperfusion injury and acquired and congenic neutropenia.

[0402] f. Interleukin 2

[0403] Interleukin-2 (IL-2) is a glycoprotein produced by T-cells in response to antigenic or mitogenic stimulation. The IL-2 gene encodes a 153 amino acid precursor protein (SEQ ID NO:289) that includes a 20 amino acid signal peptide. Post-translational processing results in a glycosylated mature IL-2 protein that is 133 amino acids long (SEQ ID NO:290). The mature IL-2 is O-glycosylated at a site corresponding to T3 of the mature IL-2 sequence set forth in SEQ ID NO:290 and T23 of the precursor polypeptide set forth in SEQ ID NO:289. IL-2 is required for T-cell proliferation and other activities crucial to regulation of the immune response. It can stimulate B-cells, monocytes, lymphokine-activated killer cells, natural killer cells, and glioma cells.

[0404] Provided herein are modified IL-2 polypeptides that exhibit increased resistance to proteolysis compared to an un-modified IL-2 polypeptide by virtue of one or more modifications at an is-Hit residue masked by glycosylation at glycosylation sites T3. The modified IL-2 polypeptides provided herein can further contain additional modifications at un-masked or exposed is-Hit positions. Is-Hit positions susceptible to protease degradation can be identified using the methods described in U.S. Patent Publication No. 20050202438. Exemplary is-Hit positions conferring protease resistant and the replacement amino acids are set forth in Table 10 below. These include masked and un-masked is-Hit residues. One of skill in the art, such as by using the methods described herein, can identify those is-Hit residues that are masked by glycosylation. Modified IL-2 polypeptides provided herein can further contain any other modification in an IL-2 known in the art, so long as the polypeptide contains at least one modification, at a masked is-Hit position and retains activity of the IL-2 polypeptide.

[0405] The modified IL-2 polypeptides provided herein can be produced as a glycosylated, partially glycosylated or de-glycosylated polypeptide. For example, the modified IL-2 polypeptides provided herein can be produced using a prokaryotic expression system, such as expression systems using E. coli as the host cells. In other examples, modified IL-2 polypeptides can be produced as non-glycosylated proteins by modification of one or more glycosylation sites. For example, modification at T3 of a mature IL-2 polypeptide (SEQ ID NO:290) can result in a non-glycosylated protein. The modified IL-2 polypeptides provided herein retain activity of a fully glycosylated IL-2 polypeptide that does not contain the modification(s). The modified IL-2 polypeptides, therefore, can be used to treat conditions and diseases normally treated by IL-2, including, infections, such as HIV and cytomegalovirus infection, lymphocytopenia, and cancers, including metastatic melanoma and metastatic kidney cancer.

TABLE 10
Interleukin-2 (IL-2) Modifications to Increase Resistance to Proteolysis

| | | | | |
|---|---|---|---|---|
| K43N | K43Q | Y45H | Y45I | K48N |
| K48Q | K49N | K49Q | E52N | E52Q |
| E52H | L53I | L53V | E60N | E60Q |
| E60H | E61N | E61Q | E61H | P65A |
| P65S | E67N | E67Q | E67H | E68N |
| E68Q | E68H | L72I | L72V | E100N |
| E100Q | E100H | F103I | F103V | M104I |
| M104V | E106N | E106Q | E106H | Y107H |
| Y107I | D109N | D109Q | E110N | E110Q |
| E110H | L132I | L132V | | |

[0406] g. Interleukin 3

[0407] Exemplary of glycosylated cytokines is interleukin-3 (IL-3). IL-3 is produced by activated T cells, monocytes/macrophages and stroma cells as a 152 amino acid precursor polypeptide (SEQ ID NO:291) with a 19 amino acid signal sequence. The 133 amino acid mature protein, set forth in SEQ ID NO:292, is produced following cleavage of the signal sequence. The IL-3 polypeptide contains N-linked glycosylation sites at N15 and N70 of the mature polypeptide set forth in SEQ ID NO:292 (corresponding to N34 and N89 of the precursor polypeptide set forth in SEQ ID NO:291). IL3 is multipotent hematopoietic growth factor that regulates the growth and differentiation of hematopoietic progenitor cells of the myeloid, erythroid and megakaryocytic lineages and functionally activates mature neutrophils and macrophages. As such, IL-3 can be used to expand haemopoietic cell populations.

[0408] Provided herein are modified IL-3 polypeptides that exhibit increased resistance to proteolysis compared to an un-modified IL-3 polypeptide by virtue of one or more modifications at an is-Hit residue masked by glycosylation at glycosylation sites N15 and N70. The modified IL-3 polypeptides provided herein can further contain additional modifications at un-masked or exposed is-Hit positions. Is-Hit positions susceptible to protease degradation can be identified using the methods described in U.S. Patent Publication No. 20050202438. Exemplary is-Hit positions conferring protease resistant and the replacement amino acids are set forth in Table 11 below. These include masked and un-masked is-Hit residues. One of skill in the art, such as by using the methods described herein, can identify those is-Hit residues that are masked by glycosylation. Modified IL-3 polypeptides provided herein can further contain any other modification in an IL-3 known in the art, so long as the polypeptide contains at least one modification at a masked is-Hit position and retains activity of the IL-3 polypeptide.

[0409] The modified IL-3 polypeptides provided herein can be produced as a glycosylated, partially glycosylated or de-glycosylated polypeptide. In one example, modified IL-3 polypeptides can be generated by production of protease-resistant polypeptides in host cells that are incapable of glycosylation, including, for example, prokaryotic hosts such as E. coli. In another example, non-glycosylated protease-resistant IL-3 cytokines can be generated by mutation of one or both of the N-glycosylation sites in the polypeptide. For example, a protease-resistant polypeptide having one or more modifications in at least one masked is-HIT residue among modifications set forth in Table 11 corresponding to amino acid replacements in SEQ ID NO:292 can further include modification of amino acid positions N15 and/or N70.

[0410] The modified IL-3 polypeptides provided herein retain activity of a fully glycosylated IL-3 polypeptide that does not contain the modification. Such modified IL-3 polypeptides can be used in the treatment of diseases or disorders for which IL-3 is normally used to treat. Exemplary of such diseases or disorders include, but are not limited to, congenital or acquired neutropenias and thrombocytopenias, such as those induced by chemotherapy.

TABLE 11
Interleukin-3 (IL-3) Modifications to Increase Resistance to Proteolysis

| | | | | |
|---|---|---|---|---|
| F37I | F37V | E43N | E43Q | E43H |
| D46N | D46Q | E59N | E59Q | E59H |
| R63H | R63Q | K66N | K66Q | P96A |
| P96S | K100N | K100Q | D101N | D101Q |
| D103N | D103Q | | | |

[0411] h. Interleukin 4

[0412] Exemplary of a glycosylated cytokine is Interleukin 4 (IL-4). IL-4 is synthesized as a precursor of 153 amino acids (SEQ ID NO:293), including a 24 amino acid signal peptide. The sequence of mature IL-4 is set forth in SEQ ID NO:294 (UniProt No. P05112) and is 129 amino acids in length. IL-4 has 2 N-linked glycosylation sites (corresponding to amino 62 and 129 of the precursor polypeptide set forth in SEQ ID NO:293 and amino acids 38 and 105 of the mature polypeptide set forth in SEQ ID NO:294). IL-4 also contains six cysteine residues involved in disulfide bond formation. IL-4 induces the differentiation of naïve helper T cells to Th2 cells. IL-4 also plays a role in the stimulation of activated B-cells and proliferation of T cells. Thus, IL-4 is a regulator of humor and adaptive immunity.

[0413] Provided herein are modified IL-4 polypeptides that exhibit increased resistance to proteolysis compared to an un-modified IL-4 polypeptide by virtue of one or more modifications at an is-Hit residue masked by glycosylation at glycosylation sites N38 and N105. The modified IL-4 polypeptides provided herein can further contain additional modifications at un-masked or exposed is-Hit positions. Is-Hit positions susceptible to protease degradation can be identified using the methods described in U.S. Patent Publication No. 20050202438. Exemplary is-Hit positions conferring protease resistant and the replacement amino acids are set forth in Table 12 below. These include masked and un-masked is-Hit residues. One of skill in the art, such as by using the methods described herein, can identify those is-Hit residues that are masked by glycosylation. Modified IL-4 polypeptides provided herein can further contain any other modification in an IL-4 known in the art, so long as the polypeptide contains at least one modification at a masked is-Hit position and retains activity of the IL-4 polypeptide.

[0414] The modified IL-4 polypeptides provided herein can be produced as a glycosylated, partially glycosylated or de-glycosylated polypeptide. In one example, modified IL-4 polypeptides can be generated by production of protease-resistant polypeptides in host cells that are incapable of glycosylation, including, for example, prokaryotic hosts such as E. coli. In another example, non-glycosylated protease-resistant IL-4 cytokines can be generated by mutations of one or more, up to all, of the glycosylation sites in the polypeptide. For example, a protease-resistant polypeptide having one or more modifications at least one masked is-Hit residues among modifications set forth in Table 12 corresponding to amino acid replacements in SEQ ID NO:294 can further include modification of one or more amino acid positions N38 and/or N105. The modified IL-4 polypeptides provided herein retain activity of a fully glycosylated IL-4 polypeptide that does not contain the modification(s). Such modified IL-4 polypeptides can be used in the treatment of diseases or disorders for which IL-4 is normally used to treat. Exemplary of such diseases or disorders include, but are not limited to, inflammatory and autoimmune diseases such as collagen-induced arthritis, autoimmune diabetes, multiple sclerosis and inflammatory bowel disease; and cancer, including but not limited to colon and mammary carcinomas.

TABLE 12
Interleukin-4 (IL-4) Modifications to Increase Resistance to Proteolysis

| | | | | |
|---|---|---|---|---|
| E26N | E26Q | E26H | K37N | K37Q |
| R53H | R53Q | E60N | E60Q | E60H |
| K61N | K61Q | R64H | R64Q | L66I |
| L66V | P100A | P100S | K102N | K102Q |
| E103N | E103Q | E103H | K126N | K126Q |

[0415] i. Interleukin 5

[0416] Exemplary of a glycosylated cytokine is IL-5. IL-5 is a homodimeric glycoprotein that promotes the proliferation, differentiation and activation of eosinophils. IL-5 also functions to stimulate B cell growth and increases immunoglobulin secretion. IL-5 is synthesized as a precursor of 134 amino acids (SEQ ID NO:295), including a 19 amino acid signal peptide. The sequence of mature IL-5 is set forth in SEQ ID NO:296 and is 115 amino acids in length. IL-5 is an antiparallel dimer linked by two cysteines (corresponding to C44 and C86 of the sequence of amino acids set forth in SEQ ID NO:296). IL-5 also is glycosylated by O-linked and N-linked glycosylation at T3 and N28, respectively, corresponding to the sequence of amino acids set forth in SEQ ID NO:296 (Minamitake et al. (1990) J. Biochem., 107:2:292-297).

[0417] Provided herein are modified IL-5 polypeptides that exhibit increased resistance to proteolysis compared to an un-modified IL-5 polypeptide by virtue of one or more modifications at an is-Hit residue masked by glycosylation at glycosylation sites T3 and N28. The modified IL-5 polypeptides provided herein can further contain additional modifications at un-masked or exposed is-Hit positions. Is-Hit positions susceptible to protease degradation can be identified using the methods described in U.S. Patent Publication No. 20050202438. Exemplary is-Hit positions conferring protease resistant and the replacement amino acids are set forth in Table 13 below. These include masked and un-masked is-Hit residues. One of skill in the art, such as by using the methods described herein, can identify those is-Hit residues that are masked by glycosylation. Modified IL-5 polypeptides provided herein can further contain any other modification in an IL-5 known in the art, so long as the polypeptide contains at least one modification at a masked is-Hit position and retains activity of the IL-5 polypeptide.

[0418] The modified IL-5 polypeptides provided herein can be produced as a glycosylated, partially glycosylated or de-glycosylated polypeptide. In one example, modified IL-5 polypeptides can be generated by production of protease-resistant polypeptides in host cells that are incapable of glycosylation, including, for example, prokaryotic hosts such as E. coli. In another example, non-glycosylated protease-resistant IL-5 cytokines can be generated by mutations of one or more, up to all, of the glycosylation sites in the polypeptide. For example, a protease-resistant polypeptide having one or more modifications at least one masked is-HIT residue among modifications set forth in Table 13 corresponding to amino acid replacements in SEQ ID NO:296 can further include modification of one or more amino acid positions T3 and/or N28. The modified IL-5 polypeptides provided herein retain activity of a fully glycosylated IL-5 polypeptide that does not contain the modification(s). Such modified IL-5 polypeptides can be used in the treatment of diseases or disorders for which IL-5 is normally used to treat, including, for example, any where eosinophilia contributes to prognosis. Exemplary of such diseases include, but are not limited to, cancers such as colonic, gastric, and carcinomas of the lung, urinary bladder, uterine cervix and head and neck; and graft rejection.

TABLE 13
Interleukin-5 (IL-5) Modifications to Increase Resistance to Proteolysis

| | | | | |
|---|---|---|---|---|
| R32H | R32Q | P34A | P34S | K39N |
| K39Q | E46N | E46Q | E46H | E47N |
| E47Q | E47H | E56N | E56Q | E56H |
| K84N | K84Q | K85N | K85Q | E88N |
| E88Q | E88H | E89N | E89Q | E89H |
| R90H | R90Q | E102N | E102Q | E102H |
| E110N | E110Q | E110H | W111S | W111H |

[0419] j. Interleukin 6

[0420] Exemplary of a glycosylated cytokine is Interleukin 6 (IL-6). IL-6 is a pleiotropic cytokine and can stimulate the development, proliferation and maturation of a number of hematopoietic cells. IL-6 also is required for B cell maturation into immunoglobulin-secreting cells. IL-6 also plays a role in the differentiation of nerve cells, metabolism of bone and induction of acute phase proteins in hepatocytes. IL-6 is synthesized as a precursor of 212 amino acids (SEQ ID NO:297), including a 29 amino acid signal peptide. The sequence of mature IL-6 is set forth in SEQ ID NO:298 and is 183 amino acids in length. IL-6 is expressed by T cells, macrophages, fibroblasts, endothelial cells and keratinocytes. Depending on its source of expression, the mature secreted human IL-6 contains 183 to 186 residues. For example, the amino terminus of fibroblast-derived IL-6 is A1a28 of the sequence of amino acids set forth in SEQ ID NO:297. IL-6 is modified post-translationally by N-linked and O-linked glycosylation. For example, Thr166 is an O-linked glycosylation site and Asn73 and Asn172 are N-linked glycosylation sites corresponding to residues in the precursor sequence set forth in SEQ ID NO:297 (and corresponding to residues 137, 44 and 143, respectively, in SEQ ID NO:298).

[0421] Provided herein are modified IL-6 polypeptides that exhibit increased resistance to proteolysis compared to an un-modified IL-6 polypeptide by virtue of one or more modifications at an is-Hit residue masked by glycosylation at glycosylation sites T137, N44 and N143. The modified IL-6 polypeptides provided herein can further contain additional modifications at un-masked or exposed is-Hit positions. Is-Hit positions susceptible to protease degradation can be identified using the methods described in U.S. Patent Publication No. 20050202438. Exemplary is-Hit positions conferring protease resistant and the replacement amino acids are set forth in Table 14 below. These include masked and un-masked is-Hit residues. One of skill in the art, such as by using the methods described herein, can identify those is-Hit residues that are masked by glycosylation. Modified IL-6 polypeptides provided herein can further contain any other modification in an IL-6 known in the art, so long as the polypeptide contains at least one modification at a masked is-Hit position and retains activity of the IL-6 polypeptide.

[0422] The modified IL-6 polypeptides provided herein can be produced as a glycosylated, partially glycosylated or de-glycosylated polypeptide. In one example, modified IL-6 polypeptides can be generated by production of protease-resistant polypeptides in host cells that are incapable of glycosylation, including, for example, prokaryotic hosts such as E. coli. In another example, non-glycosylated protease-resistant IL-6 cytokines can be generated by mutations of one or more, up to all, of the glycosylation sites in the polypeptide. For example, a protease-resistant polypeptide having one or more modifications at least one masked is-Hit residue among modifications set forth in Table 14 corresponding to amino acid replacements in SEQ ID NO:298 can further include modification of one or more amino acid positions T137, N44 and/or N143. The modified IL-6 polypeptides provided herein retain activity of a fully glycosylated IL-6 polypeptide that does not contain the modification(s). Such modified IL-6 polypeptides can be used in the treatment of diseases or disorders for which IL-6 is normally used to treat. Exemplary of such diseases include, but are not limited to, cancer, thrombocytopenia and neutropenia, such as induced by chemotherapy, inflammatory diseases (other than glomerulonephritis), such as multiple sclerosis, septic shock, arthritic conditions, particularly pathogen-induced arthritic conditions, for example, Lyme disease arthritis, bacterially induced arthritis, and polioarthritis; multiple sclerosis and other demyelinating diseases (i.e., diseases characterized by demyelination in the nerves, brain, and/or spinal cord, including, e.g., multiple sclerosis, acute disseminated encephalomyelitis or postinfectuous encephalitis, optic neuromyelitis, tinnitus, diffuse cerebral sclerosis, Schilder's disease, adrenoleukodystrophy, tertiary Lyme disease, tropical spastic parapoesis, and other diseases wherein demyelination especially autoimmune-mediated demyelination, is a major symptom); acute severe inflammatory conditions such as burns, septic shock, meningitis, and pneumonia; and autoimmune diseases including polychondritis, sclerodoma, Wegener granulamatosis, dermatomyositis, chronic active hepatitis, myasthenia gravis, psoriasis, psoriatic arthritis, Steven-Johnson syndrome, idiopathic sprue, autoimmune inflammatory bowel disease (including e.g. ulcerative colitis and Crohn's disease), endocrine ophthalmopathy, Graves disease, sarcoidosis, primary billiary cirrhosis, juvenile diabetes (diabetes mellitus type I), uveitis (anterior and posterior), keratoconjunctivitis sicca and vernal keratoconjunctivitis, and interstitial lung fibrosis.

TABLE 14
Interleukin-6 (IL-6) Modifications to Increase Resistance to Proteolysis

| | | | | |
|---|---|---|---|---|
| P64A | P64S | K65N | K65Q | M66I |
| M66V | E68N | E68Q | E68H | K69N |
| K69Q | F73I | F73V | F77I | F77V |
| E92N | E92Q | E92H | E98N | E98Q |
| E98H | R103H | R103Q | E105N | E105Q |
| E105H | E108N | E108Q | E108H | D133N |
| D133Q | P138A | P138S | D139N | D139Q |
| P140A | P140S | K149N | K149Q | W156S |
| W156H | R178H | R178Q | R181H | R181Q |

[0423] k. Oncostatin M

[0424] Exemplary of a glycosylated cytokine is Oncostatin M (OSM). OSM is a pleiotropic cytokine synthesized by stimulated T-cells and monocytes, and is involved in liver development, hematopoiesis, inflammation and CNS development. OSM is synthesized as a precursor of 252 amino acids (SEQ ID NO:299), including a 25 amino acid signal peptide. The sequence of mature OSM is set forth in SEQ ID NO:300 and is 227 amino acids in length. Cleavage of the 31 COOH-terminal amino acid residues at a trypsin like cleavage site yields the fully active 196 residue form of OSM. Of the five cysteine residues within the OSM sequence, four participate in disulphide bridges (i.e. between cysteines at positions C31 and C152; and C74 and C192, corresponding to residues set forth in SEQ ID NO: 299). The disulphide bond between helices A and B (C74 and C192) is necessary for OSM activity. The free cysteine residue (C105) does not mediate dimerization of OSM. OSM is further modified post-translationally by N-linked glycosylation. For example, Asn100 and Asn217 are N-linked glycosylation sites corresponding to residues in the precursor sequence set forth in SEQ ID NO:299 (and corresponding to residues 75 and 192, respectively, in SEQ ID NO:300).

[0425] Provided herein are modified OSM polypeptides that exhibit increased resistance to proteolysis compared to an un-modified OSM polypeptide by virtue of one or more modifications at an is-Hit residue masked by glycosylation at glycosylation sites N75 and N192. The modified OSM polypeptides provided herein can further contain additional modifications at un-masked or exposed is-Hit positions. Is-Hit positions susceptible to protease degradation can be identified using the methods described in U.S. Patent Publication No. 20050202438. Exemplary is-Hit positions conferring protease resistant and the replacement amino acids are set forth in Table 15 below. These include masked and un-masked is-Hit residues. One of skill in the art, such as by using the methods described herein, can identify those is-Hit residues that are masked by glycosylation. Modified OSM polypeptides provided herein can further contain any other modification in an OSM known in the art, so long as the polypeptide contains at least one modification at a masked is-Hit position and retains activity of the OSM polypeptide.

[0426] The modified OSM polypeptides provided herein can be produced as a glycosylated, partially glycosylated or de-glycosylated polypeptide. In one example, modified OSM polypeptides can be generated by production of protease-resistant polypeptides in host cells that are incapable of glycosylation, including, for example, prokaryotic hosts such as E. coli. In another example, non-glycosylated protease-resistant OSM cytokines can be generated by mutations of one or more, up to all, of the glycosylation sites in the polypeptide. For example, a protease-resistant polypeptide having one or more modifications at least one masked is-Hit residue among modifications set forth in Table 15 corresponding to amino acid replacements in SEQ ID NO: 300 can further include modification of one or more amino acid positions N75 and/or N192. The modified OSM polypeptides provided herein retain activity of a fully glycosylated OSM polypeptide that is does not contain the modification(s). Such modified OSM polypeptides can be used in the treatment of diseases or disorders for which OSM is normally used to treat. Exemplary of such diseases or treatments include, but are not limited to chronic inflammatory diseases, acute and chronic gastrointestinal inflammation, rheumatoid arthritis and multiple sclerosis and tissue damage suppression.

TABLE 15
Oncostatin M Modifications to Increase Resistance to Proteolysis

| | | | | |
|---|---|---|---|---|
| E59N | E59Q | E59H | E60N | E60Q |
| E60H | R63H | R63Q | L65I | L65V |
| R84H | R84Q | D87N | D87Q | E89N |
| E89Q | E89H | R91H | R91Q | K94N |
| K94Q | D97N | D97Q | E99N | E99Q |
| E99H | R100H | R100Q | L103I | L103V |
| E106N | E106Q | E106H | | |

[0427] 1. Stem Cell Factor

[0428] Exemplary of a glycosylated cytokine is Stem Cell Factor (SCF). SCF (also known as “steel factor” or “c-kit ligand”) is a cytokine which binds CD117 (c-Kit) and is important for the survival, proliferation, and differentiation of hematopoietic stem cells and other hematopoietic progenitor cells. One of its functions, for example, is to change the BFU-E (burst-forming unit-erythroid) cells, which are the earliest erythrocyte precursors in the erythrocytic series, into CFU-E (colony-forming unit-erythroid) cells. SCF is synthesized as a precursor of 273 amino acids (SEQ ID NO:301), including a 25 amino acid signal peptide. The sequence of mature SCF is set forth in SEQ ID NO:302 and is 248 amino acids in length. SCF exists in two forms, cell surface bound SCF and soluble (or free) SCF. Soluble SCF is produced by the cleavage of surface bound SCF by metalloproteases to yield a 189 amino acid polypeptide corresponding to amino acids 26 to 214 of SEQ ID NO:301. SCF has two disulphide bridges between cysteines at positions C29 and C114; and C68 and C163, corresponding to residues in the precursor sequence set forth in SEQ ID NO:301. SCF is further modified post-translationally by N-linked glycosylation. For example, Asn90, Asn97, Asn118, Asn145, and Asn195 are N-linked glycosylation sites corresponding to residues in the precursor sequence set forth in SEQ ID NO:301 (and corresponding to residues 65, 72, 93, 120, and 170, respectively, in SEQ ID NO:302).

[0429] Provided herein are modified SCF polypeptides that exhibit increased resistance to proteolysis compared to an un-modified SCF polypeptide by virtue of one or more modifications at an is-Hit residue masked by glycosylation at glycosylation sites N65, N72, N93, N120 and N170. The modified SCF polypeptides provided herein can further contain additional modifications at un-masked or exposed is-Hit positions. Is-Hit positions susceptible to protease degradation can be identified using the methods described in U.S. Patent Publication No. 20050202438. Exemplary is-Hit positions conferring protease resistant and the replacement amino acids are set forth in Table 16 below. These include masked and un-masked is-Hit residues. One of skill in the art, such as by using the methods described herein, can identify those is-Hit residues that are masked by glycosylation. Modified SCF polypeptides provided herein can further contain any other modification in an SCF known in the art, so long as the polypeptide contains at least one modification at a masked is-Hit position and retains activity of the SCF polypeptide.

[0430] The modified SCF polypeptides provided herein can be produced as a glycosylated, partially glycosylated or de-glycosylated polypeptide. In one example, modified SCF polypeptides can be generated by production of protease-resistant polypeptides in host cells that are incapable of glycosylation, including, for example, prokaryotic hosts such as E. coli. In another example, non-glycosylated protease-resistant SCF cytokines can be generated by mutations of one or more, up to all, of the glycosylation sites in the polypeptide. For example, a protease-resistant polypeptide having one or more modifications where at least one is at a masked is-HIT residue among modifications set forth in Table 16 corresponding to amino acid replacements in SEQ ID NO:302 can further include modification of one or more amino acid positions N65, N72, N93, N120, and/or N170. The modified SCF polypeptides provided herein retain activity of a fully glycosylated SCF polypeptide that does not contain the modification(s). Such modified SCF polypeptides can be used in the treatment of diseases or disorders for which SCF is normally used to treat. Exemplary of such diseases or treatments include, but are not limited to, hepatic injury, asthma, hematopoietic engraftment.

TABLE 16
Stem Cell Factor (SCF)
Modifications to Increase Resistance to Proteolysis

| | | | | |
|---|---|---|---|---|
| M27I | M27V | K31N | K31Q | P34A |
| P34S | D37N | D37Q | D54N | D54Q |
| D58N | D58Q | D61N | D61Q | K62N |
| K62Q | F63I | F63V | K96N | K96Q |
| L98I | L98V | K99N | K99Q | K100N |
| K100Q | F102I | F102V | K103N | K103Q |
| E106N | E106Q | E106H | P107A | P107S |
| R108H | R108Q | L109I | L109V | E134N |
| E134Q | E134H | D137N | D137Q | |

[0431] m. Interferon β

[0432] Exemplary of a glycosylated cytokine is Interferon β (IFN-β). IFN-β, a member of the type I class of interferons, is a globular protein containing 5 alpha helices. Generally, IFN-β is an anti-inflammatory molecules whose observed effects on a variety of immune cells (e.g., T cells, NK cells, monocytes, macrophages and dendritic cells) include, for example, the following: enhancement of T cell cytotoxity; regulation of antibody production; inhibition of T cell proliferation and migration; downregulation of adhesion molecules; enhanced expression of tumor-associated surface antigens, stimulation of surface molecules such as MHC class I antigens, induction or activation of pro-apoptotic genes and proteins (e.g., tumor necrosis factor-related apoptosis-inducing ligand, caspases, Bak, Bax, and p53), repression of anti-apoptotic genes (e.g., Bcl-2, inhibitor of apoptosis protein), and inhibition of angiogenesis (Pestka et al. Immunological Reviews 202: 8-32 (2004); Holten et al., (2002), Arthritis Research, 4: 346-352).

[0433] IFN-β is synthesized as a precursor of 187 amino acids (SEQ ID NO:303), including a 21 amino acid signal peptide. Mature IFN-β polypeptides can be of variable length, typically including polypeptides of 166 amino acids (SEQ ID NO:304), 164 and 165 amino acids in length. IFN-β has one disulphide bridge between cysteines at positions C52 and C162, corresponding to residues in the precursor sequence set forth in SEQ ID NO:303. IFN-β is further modified post-translationally by N-linked glycosylation. For example, Asn101 is an N-linked glycosylation site (corresponding to residue 101 in the precursor sequence set forth in SEQ ID NO:303, and corresponding to residue 80 in SEQ ID NO:304). Commercial forms of IFN-β include those sold under the trademarks AVONEX®, BETASERON®, and Rebif®. IFN-β-1a (Avonex®, Biogen Inc, CA, USA, and Rebif®, Serono Inc., Geneva, Switzerland) is produced in CHO cells into which cDNA encoding IFN-β has been introduced. IFN-β-1a is 166 amino acids in length and is identical to fibroblast-derived human IFN-β (SEQ ID NO:304), including glycosylation at the asparagine residue on position 80 (Nelissen et al. Brain 126: 1371-1381 (2003)). Rebif® IFN-β-1a differs from Avonex® IFN-β-1a in that it is formulated for administration to the skin (i.e., subcutaneously) rather than intramuscular administration. IFN-β-1b (Betaseron®, Berlex laboratories, Richmond, Calif., USA) is produced in E. coli that bears a genetically engineered plasmid encoding human IFN-β. The resulting expressed IFN-β-1b product is not glycosylated, is lacking the amino terminal methionine (Met1), and the cysteine residue at position 17 (of SEQ ID NO:304) is mutated to a serine. IFN-β-1b is 165 amino acids in length and does not include the carbohydrate side chains that are found in natural human IFN-β (Nelissen et al. Brain 126: 1371-1381 (2003)).

[0434] Provided herein are modified IFN-β polypeptides that exhibit increased resistance to proteolysis compared to an un-modified IFN-β polypeptide by virtue of one or more modifications at an is-Hit residue masked by glycosylation at glycosylation sites N80. The modified IFN-β polypeptides provided herein can further contain additional modifications at un-masked or exposed is-Hit positions. Is-Hit positions susceptible to protease degradation can be identified using the methods described in U.S. Patent Publication No. 20050202438. Exemplary is-Hit positions conferring protease resistant and the replacement amino acids are set forth in Table 17 below. These include masked and un-masked is-Hit residues. One of skill in the art, such as by using the methods described herein, can identify those is-Hit residues that are masked by glycosylation. Modified IFN-β polypeptides provided herein can further contain any other modification in an IFN-β known in the art, so long as the polypeptide contains at least one modification at a masked is-Hit position and retains activity of the IFN-β polypeptide.

[0435] The modified IFN-β polypeptides provided herein can be produced as a glycosylated, partially glycosylated or de-glycosylated polypeptide. In one example, modified IFN-β polypeptides can be generated by production of protease-resistant polypeptides in host cells that are incapable of glycosylation, including, for example, prokaryotic hosts such as E. coli. In another example, non-glycosylated protease-resistant IFN-β cytokines can be generated by mutations of one or more, up to all, of the glycosylation sites in the polypeptide. For example, a protease-resistant polypeptide having one or more modifications where at least one is at a masked is-HIT residue among the modifications set forth in Table 17 corresponding to amino acid replacements in SEQ ID NO:304 can further include modification of amino acid position N80. The modified IFN-β polypeptides provided herein retain activity of a fully glycosylated IFN-β polypeptide that does not contain the modification(s). Such modified IFN-β polypeptides can be used in the treatment of diseases or disorders for which IFN-β is normally used to treat and/or are responsive to the administration of IFN-β. Exemplary of such diseases include, but are not limited to viral infection, a proliferative disorder, an autoimmune disease, and an inflammatory disorder. In such an example where the disease to be treated is an autoimmune disease, the disease or condition can be, but is not limited to, any one of multiple sclerosis, rheumatoid arthritis, chronic viral hepatitis, hepatitis A, hepatitis B, and myocardial viral infection. In such another example where the disease to be treated is a proliferative disorder, the disease or condition can be, but is not limited to, a cancer or bone disorder. Exemplary of cancers to be treated with a pharmaceutical composition provided herein include uveal, melanoma, colon cancer, liver cancer, or metastatic cancer. Exemplary of a bone disorder is osteoporosis or osteopenia. In such a further example, where the disease to be treated is an inflammatory disorder, the disease or condition can be, but is not limited to, any of asthma, Guillain-Barre syndrome, and inflammatory bowel disease such as for example, ulcerative colitis or Crohn's disease. In an additional example, where the disease is a viral infection, the infection can be, but is not limited to, chronic viral hepatitis or myocardial infection.

TABLE 17
Interferon-β (IFN-β) Modifications to Increase Resistance to Proteolysis

| | | | | |
|---|---|---|---|---|
| M1I | M1V | M1T | M1Q | M1A |
| Y3H | Y3I | L5I | L5V | L5T |
| L5Q | L5H | L5A | L6I | L6V |
| F8I | F8V | L9I | L9V | L9T |
| L9Q | L9H | L9A | R11H | R11Q |
| F15I | F15V | K19N | K19Q | K19T |
| K19S | K19H | L20I | L20V | L21I |
| L21V | W22S | W22H | L24I | L24V |
| N25H | N25Q | N25S | R27H | R27Q |
| L28I | L28V | L28T | L28Q | L28H |
| L28A | E29N | E29Q | E29H | Y30H |
| Y30I | L32I | L32V | L32T | L32Q |
| L32H | L32A | K33N | K33Q | K33T |
| K33S | K33H | D34N | D34Q | R35H |
| R35Q | M36I | M36V | M36T | M36Q |
| M36A | F38I | F38V | D39N | D39Q |
| D39H | D39G | P41A | P41S | E42N |
| E42Q | E42H | E43N | E43Q | E43H |
| K45N | K45Q | K45T | K45S | K45H |
| L47I | L47V | L47T | L47Q | L47H |
| L47A | F50I | F50V | K52N | K52Q |
| K52T | K52S | K52H | E53N | E53Q |
| E53H | D54N | D54Q | L57I | L57V |
| Y60H | Y60I | E61N | E61Q | E61H |
| M62I | M62V | L63I | L63V | F67I |
| F67V | F70I | F70V | R71H | R71Q |
| D73N | D73Q | D73H | D73G | W79S |
| W79H | E81N | E81Q | E81H | E85N |
| E85Q | E85H | L87I | L87V | L88I |
| L88V | Y92H | Y92I | L98I | L98V |
| K99N | K99Q | K99T | K99S | K99H |
| L102I | L102V | E103N | E103Q | E103H |
| E104N | E104Q | E104H | K105N | K105Q |
| K105T | K105S | K105H | L106I | L106V |
| E107N | E107Q | E107H | K108N | K108Q |
| K108T | K108S | K108H | E109N | E109Q |
| E109H | D110N | D110Q | D110H | D110G |
| F111I | F111V | R113H | R113Q | K115N |
| K115Q | L116I | L116V | L116T | L116Q |
| L116H | L116A | M117I | M117V | L120I |
| L120V | L120T | L120Q | L120H | L120A |
| L122I | L122V | K123N | K123Q | K123T |
| K123S | K123H | R124H | R124Q | Y125H |
| Y125I | Y126H | Y126I | R128H | R128Q |
| L130I | L130V | L130T | L130Q | L130H |
| L130A | Y132H | Y132I | L133I | L133V |
| K134N | K134Q | K134T | K134S | K134H |
| K136N | K136Q | K136T | K136S | K136H |
| E137N | E137Q | E137H | Y138H | Y138I |
| W143S | W143H | R147H | R147Q | E149N |
| E149Q | E149H | L151I | L151V | R152H |
| R152Q | F154I | F154V | Y155H | Y155I |
| F156I | F156V | R159H | R159Q | L160I |
| L160V | Y163H | Y163I | L164I | L164V |
| R165H | R165Q | M1D | M1E | M1K |
| M1N | M1R | M1S | L5D | L5E |
| L5K | L5R | L5N | L5S | L6D |
| L6E | L6K | L6N | L6Q | L6R |
| L6S | L6T | F8D | F8E | F8K |
| F8R | L9D | L9E | L9K | L9N |
| L9R | L9S | Q10D | Q10E | Q10K |
| Q10N | Q10R | Q10S | Q10T | S12D |
| S12E | S12K | S12R | S13D | S13E |
| S13K | S13N | S13Q | S13R | S13T |
| N14D | N14E | N14K | N14Q | N14R |
| N14S | N14T | F15D | F15E | F15K |
| F15R | Q16D | Q16E | Q16K | Q16N |
| Q16R | Q16S | Q16T | C17D | C17E |
| C17K | C17N | C17Q | C17R | C17S |
| C17T | L20N | L20Q | L20R | L20S |
| L20T | L20D | L20E | L20K | W22D |
| W22E | W22K | W22R | Q23D | Q23E |
| Q23K | Q23R | L24D | L24E | L24K |
| L24R | G78D | G78E | G78K | G78R |
| W79D | W79E | W79K | W79R | N80D |
| N80E | N80K | N80R | T82D | T82E |
| T82K | T82R | I83D | I83E | I83K |
| I83R | I83N | I83Q | I83S | I83T |
| N86D | N86E | N86K | N86R | N86Q |
| N86S | N86T | L87D | L87E | L87K |
| L87R | L87N | L87Q | L87S | L87T |
| A89D | A89E | A89K | A89R | N90D |
| N90E | N90K | N90Q | N90R | N90S |
| N90T | V91D | V91E | V91K | V91N |
| V91Q | V91R | V91S | V91T | Q94D |
| Q94E | Q94K | Q94N | Q94R | Q94S |
| Q94T | I95D | I95E | I95K | I95N |
| I95Q | I95R | I95S | I95T | H97D |
| H97E | H97K | H97N | H97Q | H97R |
| H97S | H97T | L98D | L98E | L98K |
| L98N | L98Q | L98R | L98S | L98T |
| V101D | V101E | V101K | V101N | V101Q |
| V101R | V101S | V101T | M1C | L6C |
| Q10C | S13C | Q16C | N90C | V91C |
| Q94C | H97C | L98C | V101C | L5D/L6E |
| L5E/Q10D | L5Q/M36I | L6E/L47I | L5E/K108S | L5E/L6E |
| L5D/Q10D | L5N/M36I | L6Q/L47I | L5D/K108S | L5N/L6E |
| L5Q/Q10D | L6E/M36I | L5E/N86Q | L5Q/K108S | L5Q/L6E |
| L5N/Q10D | L6Q/M36I | L5D/N86Q | L5N/K108S | L5D/L6Q |
| L6E/Q10D | L5E/L47I | L5Q/N86Q | L6E/K108S | L5E/L6Q |
| L6Q/Q10D | L5D/L47I | L5N/N86Q | L6Q/K108S | L5N/L6Q |
| L5E/M36I | L5Q/L47I | L6E/N86Q | L5Q/L6Q | L5D/M36I |
| L5N/L47I | L6Q/N86Q | L6E/K108S | L6H | L6A |
| L20H | L20A | L21T | L21Q | L21H |
| L21A | L24T | L24Q | L24H | L24A |
| D 34G | D54G | L57T | L57Q | L57H |
| L57A | M62T | M62Q | M62A | L63T |
| L63Q | L63H | L63A | L87H | L87A |
| L88T | L88Q | L88H | L88A | L98H |
| L98A | L102T | L102Q | L102H | L102A |
| L106T | L106Q | L106H | L106A | K115S |
| K115H | K155N | M117T | M117Q | M117A |
| L122T | L122Q | L122H | L122A | L133T |
| L133Q | L133H | L133A | L151T | L151Q |
| L151H | L151A | L160T | L160Q | L160H |
| L160A | L164T | L164Q | L164H | L164A |
| Q18H | Q18S | Q18T | Q18N | Q23H |
| Q23S | Q23T | Q23N | Q48H | Q48S |
| Q48T | Q48N | Q49H | Q49S | Q49T |
| Q49N | Q51H | Q51S | Q51T | Q51N |
| Q64H | Q64S | Q64T | Q64N | Q72H |
| Q72S | Q72T | Q72N | | |

[0436] n. Interferon γ

[0437] Exemplary of a glycosylated cytokine is Interferon γ (IFN-γ). In general, IFN-γ is a pleiotropic cytokine produced by immune cells including activated T-cells and NK cells. IFN-γ, and the cells that produce it, play a pivotal role in host defense by exerting anti-viral, antiproliferative and immunoregulatory effects on a variety of cells types. For example, IFN-γ has the ability to enhance the functional activity of macrophages, promote T and B cell differentiation, modulate class I and II MHC antigen expression on a variety of cells, activate natural killer cells and neutrophils and prolong neutrophil survival. IFN-γ polypeptides are heterogeneous polypeptides, are made of varying amino acid sequence lengths and include, but are not limited to, recombinantly produced polypeptides, synthetically produced polypeptides and IFN-γ extracted from cells and tissues such as, for example, T lymphocyte and natural killer (NK) cells. Generally, IFN-γ is produced as a larger polypeptide that is matured to a smaller polypeptide upon cleavage of the signal sequence. Mature IFN-γ polypeptides are typically 124-146 amino acids in length after cleavage of the signal sequence. The precursor form of human IFN-γ is a 166 amino acid polypeptide (for example, SEQ ID NO:305), and includes a signal sequence (i.e. amino acids 1-20) that is cleaved, resulting in a mature polypeptide, such as for example, a mature polypeptide of 146 amino acids set forth in SEQ ID NO:306. IFN-γ is further modified post-translationally by N-linked glycosylation. For example, Asn48 and Asn120 are N-linked glycosylation sites corresponding to residues in the precursor sequence set forth in SEQ ID NO:305 (and corresponding to residues 28 and 100, respectively, in SEQ ID NO:306).

[0438] In addition, mature IFN-γ can exist in forms that are less than 146 amino acids in length such as, for example, 124, 125, 138, 139, 140, 141, 142, 143, 144, and 145 amino acids in length. The heterogeneity of IFN-γ polypeptides stems from natural truncations of IFN-γ that occur at the C-terminus, for example due to proteolytic digestion before and after secretion. For example, the truncation can be effected by endo- and/or exoprotease activity produced by the host cell. In some instances, the proteolytic degradation after secretion is due to the presence of proteolytic enzymes in the culture medium.

[0439] Deletion of amino acid residues at the N-terminus of IFN-γ also have been reported. In some instances, deletion of residues at the N-terminus is due to post-translational modification. Depending on the source of IFN-γ, post-translational modification of IFN-γ can involve the removal of the first three amino acids from the mature polypeptide set forth in SEQ ID NO:306, i.e. amino acid residues Cys-Tyr-Cys (The Cytokine FactsBook, (1994) Callard R., and Gearing A., (eds) pp. 157-158).

[0440] For purposes herein, modification of an IFN-γ polypeptide is with reference to an IFN-γ polypeptide having a length of 146 amino acids (SEQ ID NO:306). It is understood, however, that modified IFN-γ polypeptides provided herein can be produced by methods known to those of skill in the art and can be produced in varying lengths. Thus, the modified IFN-γ polypeptides provided herein include those that are 146 amino acids in length (i.e. containing amino acid modifications in a mature IFN-γ polypeptide set forth in SEQ ID NO:306), fragments thereof that are variously truncated at the N- or C-terminus, or combinations thereof. If necessary, IFN-γ polypeptides can be purified to homogeneity to be of any desired length.

[0441] Provided herein are modified IFN-γ polypeptides that exhibit increased resistance to proteolysis compared to an un-modified IFN-γ polypeptide by virtue of one or more modifications at an is-Hit residue masked by glycosylation at glycosylation sites N28 and N100. The modified IFN-γ polypeptides provided herein can further contain additional modifications at un-masked or exposed is-Hit positions. Is-Hit positions susceptible to protease degradation can be identified using the methods described in U.S. Patent Publication No. 20050202438. Exemplary is-Hit positions conferring protease resistant and the replacement amino acids are set forth in Table 18 below. These include masked and un-masked is-Hit residues. One of skill in the art, such as by using the methods described herein, can identify those is-Hit residues that are masked by glycosylation. Modified IFN-γ polypeptides provided herein can further contain any other modification in an IFN-γ known in the art, so long as the polypeptide contains at least one modification at a masked is-Hit position and retains activity of the IFN-γ polypeptide.

[0442] The modified IFN-γ polypeptides provided herein can be produced as a glycosylated, partially glycosylated or de-glycosylated polypeptide. In one example, modified IFN-γ polypeptides can be generated by production of protease-resistant polypeptides in host cells that are incapable of glycosylation, including, for example, prokaryotic hosts such as E. coli. In another example, non-glycosylated protease-resistant IFN-γ cytokines can be generated by mutations of one or more, up to all, of the glycosylation sites in the polypeptide. For example, a protease-resistant polypeptide having one or more modifications, where at least one modification is at a masked is-HIT residue among the modifications set forth in Table 18 corresponding to amino acid replacements in SEQ ID NO:306 can further include modification of one or more amino acid positions N28 and N100. The modified IFN-γ polypeptides provided herein retain activity of a fully glycosylated IFN-γ polypeptide that is not protease-resistant. Such non-glycosylated protease-resistant polypeptides can be used in the treatment of diseases or disorders for which IFN-γ is normally used to treat. Exemplary of such diseases include, but are not limited to, a viral infection (e.g., hepatitis C, acquired immunodeficiency syndrome), a bacterial infection, a fungal infection (e.g., aspergillosis, candidemia), a cancerous condition (e.g., neutropenia, hemopoietic cell transplantation), a cancer, liver disease, a pulmonary disease or condition, malignant osteopetrosis or chronic granulomatous.

TABLE 18
Interferon-γ (IFN-γ) Modifications to
Increase Resistance to Proteolysis

| | | | | |
|---|---|---|---|---|
| Y2H | Y2I | D5N | D5Q | P6A |
| P6S | Y7H | Y7I | K9N | K9Q |
| E10N | E10Q | E10H | E12N | E12Q |
| E12H | L14I | L14V | K15N | K15Q |
| K16N | K16Q | Y17H | Y17I | F18I |
| F18V | D24N | D24Q | D27N | D27Q |
| N28Q | N28S | L31I | L31V | F32I |
| F32V | L33I | L33V | L36I | L36V |
| K37N | K37Q | W39S | W39H | K40N |
| K40Q | E41N | E41Q | E41H | E42N |
| E42Q | E42H | D44N | D44Q | R45H |
| R45Q | F57I | F57V | K58N | K58Q |
| L59I | L59V | F60I | F60V | K61N |
| K61Q | F63I | F63V | K64N | K64Q |
| D65N | D65Q | D66N | D66Q | K71N |
| K71Q | E74N | E74Q | E74H | K77N |
| K77Q | E78N | E78Q | E78H | D79N |
| D79Q | K83N | K83Q | F84I | F84V |
| K89N | K89Q | K90N | K90Q | K91N |
| K91Q | R92H | R92Q | D93N | D93Q |
| D94N | D94Q | F95I | F95V | E96N |
| E96Q | E96H | K97N | K97Q | L98I |
| L98V | Y101H | Y101I | D105N | D105Q |
| L106I | L106V | E115N | E115Q | E115H |
| E122N | E122Q | E122H | L123I | L123V |
| P125A | P125S | K128N | K128Q | K131N |
| K131Q | R132H | R132Q | K133N | K133Q |
| R134H | R134Q | M137I | M137V | L138I |
| L138V | F139I | F139V | R142H | R142Q |
| R143H | R143Q | | | |

[0443] 4. Other Modifications of Therapeutic Polypeptides

[0444] In addition to any one or more amino acid modifications for increase protease resistance provided herein, a modified therapeutic polypeptide also can contain one or more additional modifications. Generally, the modification results in increased stability without losing at least one activity of the therapeutic polypeptide. For example, other further modifications in a therapeutic polypeptide include one or more additional amino acid modifications and/or one or more chemical modifications. Such modifications include, but are not limited to, those that alter the immunogenicity, glycosylation, activity, or any other known property of a therapeutic polypeptide. In some examples the amino acid modification, alters a property of therapeutic polypeptide, which is required for its activity. For example, the amino acid modification can increase or decrease the interaction of the therapeutic polypeptide with another polypeptide, such as a receptor. In some examples, the amino acid modification compensates for a loss of a property. For example, if one amino acid modification decreases a property, such as binding to a receptor, a further amino acid modification at a different site can restore the binding.

[0445] Other further modifications in therapeutic polypeptide include one or more additional amino acid modifications and/or one or more chemical modifications or one or more additional amino acid modifications that permits additional chemical modification (e.g., creation of sites for chemical modification). Such modifications include, but are not limited to, PEGylation, deimmunization, acylation (e.g., acetylation or succinylation), methylation, phosphorylation, hasylation, carbamylation, sulfation, prenylation, oxidation, guanidination, amidination, carbamylation (i.e., carbamoylation), trinitrophenylation, nitration, others known to those of skill in the art (see e.g., U.S. Pat. No. 5,856,298; U.S. Patent Publication Nos. 2003-0120045, 2004-0063917, 2005-0220800, 2005-0107591, 2006-0035322, and 2006-0073563; and International PCT Publication No.: WO 01/81405) or combinations thereof. Exemplary methods for modification of EPO are provided elsewhere herein and similar modifications can be applied to the other modified therapeutic polypeptides provided herein.

[0446] In addition, protein modifications also can include modification to facilitate the detection, purification, and assay development of a polypeptide, such as for example, modification of a polypeptide with a Sulfo-NHS-LC-biotin for covalent attachment to a primary amine on a protein, or other modifications for attachment florescent, non-isotopic, or radioactive labels. The modified therapeutic protein can also be fused to one or more polypeptides to facilitate the targeting of the polypeptide for therapeutic use, detection, purification, and assay development or to another therapeutic polypeptide for treatment.

[0447] a. Modifications to Increase Solubility

[0448] The modified therapeutic polypeptides provided can also be further modified to increase solubility of the protein. For example, polar residues on the surface of the protein that are not required for activity of the protein can be modified to prevent aggregation of the polypeptide where it is produced in bacteria (Narhi et al. (2001) Prot. Eng. 14(2) 135-140). Generally, the residues are modified such that the protein retains one or more activities of the unmodified therapeutic protein. Residues for modification include, but are not limited to, asparagine residues that are sites of protein glycosylation. Typically, the neutral asparagine residues can be replaced by basic amino acid residues, such as lysine or histidine. In one example, the modified therapeutic protein is a modified EPO protein and one or more asparagine residues selected from amino acids N24, N38 and N83 are modified. In a particular example, N24, N38 and N83 residues in an EPO polypeptide are replaced with lysine (e.g., SEQ ID NOS: 309 or 310).

### E. EXEMPLARY METHODS FOR EVOLVING OR MODIFYING EPO POLYPEPTIDES AND OTHER MODIFIED THERAPEUTIC POLYPEPTIDES

[0449] Provided herein are EPO polypeptides containing amino acid modifications in an EPO polypeptide that render the polypeptide resistant to protease digestion. Such modified EPO polypeptides exhibit increased stability and half-life compared to an unmodified EPO polypeptide. Also provided herein are glycosylated therapeutic polypeptides, including EPO, that contain amino acid modications that render the polypeptide resistant to protease digestion, where at least one modification is at a masked is-Hit residue. The modified polypeptides provided herein are rendered protease resistance by modification of only the primary sequence of the polypeptide. Accordingly, the polypeptides provided herein exhibit increased protease resistance compared to an unmodified polypeptide without the contribution of other post-translational modifications, such as glycosylation, or other modifications such as PEGylation. Among the amino acid modifications provided herein are modifications including replacement of amino acids in the primary sequence of the polypeptide in order to decrease proteolytic cleavage of the polypeptide. The resulting polypeptides exhibit increased resistance to proteolysis by proteases (blood, serum, gastrointestinal, etc.), whereby the modified polypeptide exhibits increased half-life in vitro and/or in vivo.

[0450] Any of a variety of general approaches described for protein-directed evolution based on mutagenesis can be employed. Any of these methods or other suitable method, alone or in combination, can be used to produce modified EPO polypeptides or other therapeutic polypeptides to achieve increased stability and/or resistance to proteolysis. Such methods include, but are not limited to, random mutagenesis, where the amino acids in the starting protein sequence are replaced by all (or a group) of the 20 amino acids either in single or multiple replacements at different amino acid positions are generated on the same molecule, at the same time. Another method, restricted random mutagenesis, introduces either all of the 20 amino acids or DNA-biased residues. The bias is based on the sequence of the DNA and not on that of the protein in a stochastic or semi-stochastic manner, respectively, within restricted or predefined regions of the protein known in advance to be involved in the activity being “evolved.” Additionally, methods of rational mutagenesis including 1D-scanning, 2D-scanning and 3D-scanning can be used alone or in combination to construct modified EPO variants. Hence, any methods known in the art can be used to create modified EPO polypeptides. The resulting modified polypeptides can be tested for resistance to proteolysis and/or activity as described herein.

[0451] Any method for such modification can be employed including directed evolution methods, such as those in published U.S. application Serial Nos. US-2004-0132977-A1 and US-2005-0202438-A1. For example, in the methods described herein, modifications for increased protease resistance are chosen using the method of 2D-scanning mutagenesis as described, for example, in PCT published applications WO 2004/022747 and WO 2004/022593. Once individual LEADS are identified, they can be combined to generate modified SuperLead polypeptides.

[0452] Any EPO polypeptide or variants thereof, including species and allelic variants, can be modified using the methods described herein. For example, the methods can be used to identify modifications that confer protease resistance to any EPO polypeptide described herein, such as a wildtype EPO set forth in SEQ ID NO:2 or SEQ ID NO:237, or allelic, species, fragments, or other variants thereof. Also, it is understood that once modifications (i.e. LEADs) are identified using the methods herein, routine molecular biology techniques can be used to introduce modifications into any EPO polypeptide backbone of choice at corresponding amino acid residue or loci. The LEAD modifications can be combined to generate Super-LEAD EPO polypeptides having 2, 3, 4, 5, 6, 7, 8, 9, 10, 11, 12, 13, 14, 15, 16, 17, 18, 19, 20 or more mutations that each confer protease resistance. Any modification can further be combined with any other EPO variant known in the art, or any other modification to an EPO polypeptide (e.g. glycosylation, PEGylation, carbamylation). Routine assays to assess protease resistance, half-life, stability and/or activity can be performed to ensure the resulting modified polypeptide retains protease resistance and/or activity as described elsewhere herein.

[0453] 1. Non-Restricted Rational Mutagenesis One-Dimensional (1D)-Scanning

[0454] Rational mutagenesis, also termed 1D-scanning, is a two-step process and is described in co-pending U.S. application Ser. No. 10/022,249 (U.S. Publication No. 2003/0134351-A1). 1D-scanning can be used to modify EPO polypeptides and, additionally, to identify positions for further modification by other methods such as 2D- and 3D-scanning. Briefly, in the first step, full-length amino acid scanning is performed where all and each amino acid in the starting polypeptide sequence (for example, the EPO polypeptide of SEQ ID NO: 2) is replaced by a designated reference amino acid (e.g., alanine). Only a single amino acid is replaced on each protein molecule at a time. A collection of protein molecules having a single amino acid replacement is generated such that molecules differ from each other by the amino acid position at which the replacement has taken place. Mutant DNA molecules are designed, generated by mutagenesis and cloned individually, such as in addressable arrays, such that they are physically separated from each other and such that each one is the single product of an independent mutagenesis reaction. Mutant protein molecules derived from the collection of mutant nucleic acid molecules also are physically separated from each other, such as by formatting in addressable arrays. Activity assessment on each protein molecule allows for the identification of those amino acid positions that result in a drop in activity when replaced, thus indicating the involvement of that particular amino acid position in the protein's biological activity and/or conformation that leads to fitness of the particular feature being evolved. Those amino acid positions are referred to as HITs.

[0455] At the second step, a new collection of molecules is generated such that each molecule differs from each of the others by the amino acid present at the individual HIT positions identified in step 1. All 20 amino acids (19 remaining) are introduced at each of the HIT positions identified in step 1; while each individual molecule contains, in principle, one and only one amino acid replacement. Mutant DNA molecules are designed, generated by mutagenesis and cloned individually, such as in addressable arrays, such that they are physically separated from each other and such that each one is the single product of an independent mutagenesis reaction. Mutant protein molecules derived from the collection of mutant DNA molecules also are physically separated from each other, such as by formatting in addressable arrays. Activity assessment then is individually performed on each individual mutant molecule. The newly generated mutants that lead to a desired alteration (such as an improvement, e.g. increased protease resistance) in a protein activity are referred to as LEADs. This method permits an indirect search for property or activity alteration, such as improved stability (e.g., improved resistance to proteases) based on one rational amino acid replacement and sequence change at a single amino acid position at a time, in search of a new, unpredicted amino acid sequence at some unpredicted regions along a protein to produce a protein that exhibits a desired activity or altered activity, such as better performance than the starting protein. In this approach, neither the amino acid position nor the replacing amino acid type are restricted. Full length protein scanning is performed during the first step to identify HIT positions, and then all 20 amino acids are tested at each of the HIT positions, to identify LEAD sequences; while, as a starting point, only one amino acid at a time is replaced on each molecule. The selection of the target region (HITs and surrounding amino acids) for the second step is based upon experimental data on activity obtained in the first step. Thus, no prior knowledge of protein structure and/or function is necessary. Using this approach, LEAD sequences have been found on proteins that are located at regions of the protein not previously known to be involved in the particular biological activity being modified; thus emphasizing the power of this approach to discover unpredictable regions (HITs) as targets for fitness improvement.

[0456] 2. Two Dimensional (2D) Rational Scanning (Restricted Rational Mutagenesis)

[0457] The 2D-scanning (or restricted rational mutagenesis) methods for protein rational evolution (see, co-pending U.S. Published Application Nos. US 2005-0202438 A1 and US-2004-0132977-A1 and published International applications WO 2004/022593 and WO 2004/022747) are based on scanning over two dimensions. The first dimension is the amino acid position along the protein sequence, in order to identify is-HIT target positions. The second dimension is scanning the amino acid type selected for replacing a particular is-HIT amino acid position. An advantage of the 2D-scanning methods is that at least one, and typically the amino acid position and/or the replacing amino acid, can be restricted such that fewer than all amino acids on the protein-backbone are selected for amino acid replacement; and/or fewer than all of the remaining 19 amino acids available to replace an original, such as native, amino acid are selected for replacement.

[0458] In particular embodiments, based on i) the particular protein properties to be evolved (e.g., resistance to proteolysis), ii) sequence of amino acids of the protein, and iii) the known properties of the individual amino acids, a number of target positions along the protein sequence are selected, in silico, as “is-HIT target positions.” This number of is-HIT target positions is as large as reasonably possible such that all reasonably possible target positions for the particular feature being evolved are included. In particular, embodiments where a restricted number of is-HIT target positions are selected for replacement, the amino acids selected to replace the is-HIT target positions on the particular protein being optimized can be either all of the remaining 19 amino acids or, more frequently, a more restricted group comprising selected amino acids that are contemplated to have the desired effect on protein activity. In another embodiment, so long as a restricted number of replacing amino acids are used, all of the amino acid positions along the protein backbone can be selected as is-HIT target positions for amino acid replacement. Mutagenesis then is performed by the replacement of single amino acid residues at specific is-HIT target positions on the protein backbone (e.g., “one-by-one,” such as in addressable arrays), such that each individual mutant generated is the single product of each single mutagenesis reaction. Mutant DNA molecules are designed, generated by mutagenesis and cloned individually, such as in addressable arrays, such that they are physically separated from each other and that each one is the single product of an independent mutagenesis reaction. Mutant protein molecules derived from the collection of mutant DNA molecules also are physically separated from each other, such as by formatting in addressable arrays. Thus, a plurality of mutant protein molecules is produced. Each mutant protein contains a single amino acid replacement at only one of the is-HIT target positions. Activity assessment is then individually performed on each individual protein mutant molecule, following protein expression and measurement of the appropriate activity. An example of practice of this method is shown in the Examples in which mutant EPO molecules are produced.

[0459] The newly generated proteins that lead to altered, typically improved, target protein activity are referred to as LEADs. This method relies on an indirect search for protein improvement for a particular activity, such as increased resistance to proteolysis, based on amino acid replacement and sequence change at single or, in another embodiment, a limited number of amino acid positions at a time. As a result, optimized proteins, which have modified sequences of amino acids at some regions along the protein that perform better (at a particular target activity or other property) than or different from the starting protein, are identified and isolated.

[0460] For example, 2D-scanning on EPO was used to generate variants improved in protein stability, including improved resistance to proteolysis. To effect such modifications, amino acid positions were selected using in silico analysis of EPO.

[0461] a. Identifying in-Silico HITs

[0462] The 2D-scanning method for directed evolution of proteins includes identifying and selecting (using in silico analysis) specific amino acids and amino acid positions (referred to herein as is-HITs) along the protein sequence that are contemplated to be directly or indirectly involved in the feature being evolved. As noted, the 2D-scanning methods provided include the following two steps. The first step is an in silico search of a target sequence of amino acids of the protein to identify all possible amino acid positions that can be targets for the activity being evolved. This is effected, for example, by assessing the effect of amino acid residues on the property or properties to be altered on the protein, using any known standard software. The particulars of the in silico analysis is a function of the property to be modified.

[0463] Once identified, these amino acid positions or target sequences are referred to as “is-HITs” (in silico HITs). In silico HITs are defined as those amino acid positions (or target positions) that potentially are involved in the “evolving” feature, such as increased resistance to proteolysis. The discrimination of the is-HITs among all the amino acid positions in a protein sequence can be made based on the amino acid type at each position in addition to the information on the protein secondary or tertiary structure. In silico HITs constitute a collection of mutant molecules such that all possible amino acids, amino acid positions or target sequences potentially involved in the evolving feature are represented. No strong theoretical discrimination among amino acids or amino acid positions is made at this stage. In silico HIT positions are spread over the full length of the protein sequence. Single or a limited number of is-HIT amino acids are replaced at a time on the target EPO polypeptide or other therapeutic polypeptide.

[0464] A variety of parameters can be analyzed to determine whether or not a particular amino acid on a protein might be involved in the evolving feature, typically a limited number of initial premises (typically no more than 2) are used to determine the in silico HITs. For example, as described herein, to increase the stability of EPO polypeptides and other therapeutic polypeptides, the first condition is the nature of the amino acids linked to stability of the molecule such as its participation in directing proteolytic cleavage. A second premise, for example, can be related to the specific position of those amino acids along the protein structure.

[0465] During the first step of identification of is-HITs according to the methods provided herein, each individual amino acid along the protein sequence is considered individually to assess whether it is a candidate for is-HIT. This search is done one-by-one and the decision on whether the amino acid is considered to be a candidate for a is-HIT is based on (1) the amino acid type; (2) the position in the protein and protein structure if known; and (3) the predicted interaction between that amino acid and its neighbors in sequence and space.

[0466] Is-HITs were identified for a number of properties of EPO that contribute to protein stability, such as removal/modification of protease sensitive sites. Such modifications contribute to protein stability and thereby, to increasing the half-life of an EPO polypeptide and other therapeutic polypeptides provided in vitro, in vivo or ex vivo. The specific is-Hits identified are set forth in Section D below.

[0467] b. Identifying Replacing Amino Acids

[0468] Once the is-HITs target positions are selected, the next step is identifying those amino acids that will replace the original, such as native, amino acid at each is-HIT position to alter the activity level for the particular feature being evolved. The set of replacing amino acids to be used to replace the original, such as native, amino acid at each is-HIT position can be different and specific for the particular is-HIT position. The choice of the replacing amino acids takes into account the need to preserve the physicochemical properties such as hydrophobicity, charge and polarity of essential (e.g., catalytic, binding, etc.) residues and alter some other property of the protein (e.g., protein stability). The number of replacing amino acids of the remaining 19 non-native (or non-original) amino acids that can be used to replace a particular is-HIT target position ranges from 1 up to about 19, and anywhere in between, depending on the properties for the particular modification.

[0469] Numerous methods of selecting replacing amino acids (also referred to herein as “replacement amino acids”) are well known in the art. Protein chemists determined that certain amino acid substitutions commonly occur in related proteins from different species. As the protein still functions with these substitutions, the substituted amino acids are compatible with protein structure and function. Often, these substitutions are to a chemically similar amino acid, but other types of changes, although relatively rare, also can occur.

[0470] Knowing the types of changes that are most and least common in a large number of proteins can assist with predicting alignments and amino acid substitutions for any set of protein sequences. Amino acid substitution matrices are used for this purpose. A number of matrices are available. A detailed presentation of such matrices can be found in the co-pending U.S. Published Application Nos. US 2005-0202438 A1 and US-2004-0132977-A1 and published International applications WO 2004/022593 and WO 2004/022747, each of which is incorporated herein in their entirety. Such matrices also are known and available in the art, for example in the reference listed below.

[0471] In amino acid substitution matrices, amino acids are listed horizontally and vertically, and each matrix position is filled with a score that reflects how often one amino acid would have been paired with the other in an alignment of related protein sequences. The probability of changing amino acid “A” into amino acid “B” is assumed to be identical to the reverse probability of changing “B” into “A”. This assumption is made because, for any two sequences, the ancestor amino acid in the phylogenetic tree is usually not known. Additionally, the likelihood of replacement should depend on the product of the frequency of occurrence of the two amino acids and on their chemical and physical similarities. A prediction of this model is that amino acid frequencies will not change over evolutionary time (Dayhoff et al., Atlas of Protein Sequence and Structure, 5(3): 345-352, 1978). Several exemplary amino acid substitution matrices, including, but not limited to block substitution matrix (BLOSUM) (Henikoff et al., Proc. Nat. Acad. Sci. USA, 89: 10915-10919 (1992)), Jones et al. (Comput. Appl. Biosci., 8: 275-282 (1992)), Gonnet et al. (Science, 256: 1433-1445 (1992)), Fitch (J. Mol. Evol., 16(1): 9-16 (1966)), Feng et al. (J. Mol. Evol., 21: 112-125 (1985)), McLachlan (J. Mol. Biol., 61: 409-424 (1971)), Grantham (Science, 185: 862-864 (1974)), Miyata (J. Mol. Evol., 12: 219-236 (1979)), Rao (J. Pept. Protein Res., 29: 276-281 (1987)), Risler (J. Mol. Biol., 204: 1019-1029 (1988)), Johnson et al (J. Mol. Biol., 233: 716-738 (1993)), and Point Accepted Mutation (PAM) (Dayhoff et al., Atlas Protein Seq. Struct. 5: 345-352 (1978)).

[0472] Dayhoff and coworkers developed a model of protein evolution that resulted in the development of a set of widely used replacement matrices (Dayhoff et al., Atlas of Protein Sequence and Structure, 5(3):345-352 (1978)) termed percent accepted mutation matrices (PAM). In deriving these matrices, each change in the current amino acid at a particular site is assumed to be independent of previous mutational events at that site. Thus, the probability of change of any amino acid A to amino acid B is the same, regardless of the previous changes at that site and also regardless of the position of amino acid A in a protein sequence.

[0473] In the Dayhoff approach, replacement rates are derived from alignments of protein sequences that are at least 85% identical; this constraint ensures that the likelihood of a particular mutation being the result of a set of successive mutations is low. Because these changes are observed in closely related proteins, they represent amino acid substitutions that do not significantly change the function of the protein. Hence, they are called “accepted mutations,” as defined as amino acid changes that are accepted by natural selection.

[0474] The outcome of the two steps set forth above, which is performed in silico is that: (1) the amino acid positions that are the target for mutagenesis are identified (referred to as is-HITs); and (2) the replacing amino acids for the original, such as native, amino acids at the is-HITs are identified, to provide a collection of candidate LEAD mutant molecules that are expected to perform differently from the native molecule. These are assayed for a desired optimized, improved or altered activity.

[0475] c. Construction of Mutant Proteins and Biological Assays

[0476] Once is-HITs are selected as set forth above, replacing amino acids are introduced. Exemplary replacement amino acids in EPO using this method are set forth in Section D. Mutant proteins typically are prepared using recombinant DNA methods and assessed in appropriate biological assays for the particular activity (feature) optimized. An exemplary method of preparing the mutant proteins is by mutagenesis of the original, such as native, gene using methods well known in the art. Mutant proteins also can be generated using any other EPO polypeptide, such as allelic, species or other variant of a native polypeptide, and introducing the identified mutations at corresponding positions in the polypeptide. Mutant molecules are generated one-by-one, such as in addressable arrays, such that each individual mutant generated is the single product of each single and independent mutagenesis reaction. Individual mutagenesis reactions are conducted separately, such as in addressable arrays where they are physically separated from each other. Once a population of sets of nucleic acid molecules encoding the respective mutant proteins is prepared, each is separately introduced one-by-one into appropriate cells for the production of the corresponding mutant proteins. This also can be performed, for example, in addressable arrays where each set of nucleic acid molecules encoding a respective mutant protein is introduced into cells confined to a discrete location, such as in a well of a multi-well microtiter plate. Each individual mutant protein is individually phenotypically characterized and performance is quantitatively assessed using assays appropriate for the feature being optimized (i.e., feature being evolved). Again, this step can be performed in addressable arrays. Those mutants displaying a desired increased or decreased performance compared to the original, such as native molecules are identified and designated LEADs. From the beginning of the process of generating the mutant DNA molecules up through the readout and analysis of the performance results, each candidate LEAD mutant is generated, produced and analyzed individually, such as from its own address in an addressable array. The process is amenable to automation.

[0477] 3. Three Dimensional (3D) Scanning

[0478] 3D scanning, as described in co-pending U.S. Published Application Nos. US 2005-0202438 A1 and US-2004-0132977-A1 and published PCT applications WO 2004/022747 and WO 2004/022593, is an additional method of rational evolution of proteins based on the identification of potential target sites for mutagenesis (is-HITs). The method uses comparison of patterns of protein backbone folding between structurally related proteins, irrespective of the underlying sequences of the compared proteins. Once the structurally related amino acid positions are identified on the protein of interest, then suitable amino acid replacement criteria, such as PAM analysis, can be employed to identify candidate LEADs for construction and screening.

[0479] For example, analysis of “structural homology” between and among a number of related cytokines can be used to identify on various members of the cytokine family, those amino acid positions and residues that are structurally similar or structurally related. For example, 3D scanning can be used to identify amino acid positions on EPO that are structurally similar or structurally related to those found in cytokine mutants, for example, that have been modified for improved stability. Exemplary cytokines include, but are not limited to, granulocyte-macrophage colony stimulating factor (GM-CSF), interleukin-2 (IL-2), interleukin-3 (IL-3), interleukin-4 (IL-4), interleukin-5 (IL-5), interleukin-13 (IL-13), Flt3 ligand and stem cell factor (SCF).

[0480] Using the 3D-scanning methods described herein, once one protein within a family of proteins (e.g., EPO within cytokine family) is modified using the methods provided herein for generating LEAD mutants, is-HITs can be identified for other or all proteins within a particular family by identifying the corresponding amino acid positions therein using structural homology analysis (based upon comparisons of the 3D structures of the family members with original protein to identify corresponding residues for replacement) as described hereinafter. The is-HITs for the family members identified in this manner then can be subjected to the next step of identifying replacing amino acids and further assayed to obtain LEADs or super-LEADs as described herein. Similarly, information from 2D-scanning performed on other cytokines such as, for example, granulocyte-macrophage colony stimulating factor (GM-CSF), interleukin-2 (IL-2), interleukin-3 (IL-3), interleukin-4 (IL-4), interleukin-5 (IL-5), interleukin-13 (IL-13), Flt3 ligand, and stem cell factor (SCF), can be used to optimize EPO polypeptides.

[0481] This method can be applied to any desired phenotype using any protein, such as a cytokine, as the starting material to which an evolution procedure, such as the rational directed evolution procedure of U.S. Published Application No. US 2003-0134351 A1 or the 2-dimensional scanning method described herein. The structurally corresponding residues are then altered on members of the family to produce additional cytokines with similar phenotypic alterations.

[0482] a. Homology

[0483] Typically, homology between proteins is compared at the level of their amino acid sequences, based on the percent or level of coincidence of individual amino acids, amino acid per amino acid, when sequences are aligned starting from a reference, generally the residue encoded by the start codon. For example, two proteins are said to be “homologous” or to bear some degree of homology whenever their respective amino acid sequences show a certain degree of matching upon alignment comparison. Comparative molecular biology is primarily based on this approach. From the degree of homology or coincidence between amino acid sequences, conclusions can be made on the evolutionary distance between or among two or more protein sequences and biological systems.

[0484] The concept of “convergent evolution” is applied to describe the phenomena by which phylogenetically-unrelated organisms or biological systems have evolved to share features related to their anatomy, physiology and structure as a response to common forces, constraints and evolutionary demands from the surrounding environment and living organisms. Alternatively, “divergent evolution,” is applied to describe the phenomena by which strongly phylogenetically related organisms or biological systems have evolved to diverge from identity or similarity as a response to divergent forces, constraints and evolutionary demands from the surrounding environment and living organisms.

[0485] In the typical traditional analysis of homologous proteins there are two conceptual biases corresponding to: i) “convergent evolution,” and ii) “divergent evolution.” Whenever the aligned amino acid sequences of two proteins do not match well with each other, these proteins are considered “not related” or “less related” with each other and have different phylogenetic origins. There is no (or low) homology between these proteins and their respective genes are not homologous (or show little homology). If these two “non-homologous” proteins under study share some common functional features (e.g., interaction with other specific molecules, or activity), they are determined to have arisen by “convergent evolution,” (i.e., by evolution of their non-homologous amino acid sequences, in such a way that they end up generating functionally “related” structures).

[0486] On the other hand, whenever the aligned amino acid sequences of two proteins do match with each other to a certain degree, these proteins are considered to be “related” and to share a common phylogenetic origin. A given degree of homology is assigned between these two proteins and their respective genes likewise share a corresponding degree of homology. During the evolution of their initial highly homologous amino acid sequence, enough changes can be accumulated in such a way that they end up generating “less-related” sequences and less related function. The divergence from perfect matching between these two “homologous” proteins under study is said come from “divergent evolution.”

[0487] b. 3D-Scanning (Structural Homology) Methods

[0488] Structural homology refers to homology between the topology and three-dimensional structure of two proteins. Structural homology is not necessarily related to “convergent evolution” or to “divergent evolution,” nor is it related to the underlying amino acid sequence. Rather, structural homology is likely driven (through natural evolution) by the need of a protein to fit specific conformational demands imposed by its environment. Particular structurally homologous “spots” or “loci” would not be allowed to structurally diverge from the original structure, even when its own underlying sequence does diverge. This structural homology is exploited herein to identify loci for mutation.

[0489] Within the amino acid sequence of a protein resides the appropriate biochemical and structural signals to achieve a specific spatial folding in either an independent or a chaperon-assisted manner. Indeed, this specific spatial folding ultimately determines protein traits and activity. Proteins interact with other proteins and molecules in general through their specific topologies and spatial conformations. In principle, these interactions are not based solely on the precise amino acid sequence underlying the involved topology or conformation. If protein traits, activity (behavior and phenotypes) and interactions rely on protein topology and conformation, then evolutionary forces and constraints acting on proteins can be expected to act on topology and conformation. Proteins sharing similar functions will share comparable characteristics in their topology and conformation, despite the underlying amino acid sequences that create those topologies and conformations.

[0490] 4. Super-LEADs and Additive Directional Mutagenesis (ADM)

[0491] The SuperLead polypeptides provided herein include modification of EPO polypeptides that include combining two or more mutations of individual LEAD polypeptides. For example, Additive Directional Mutagenesis (ADM) can be used to assemble on a single mutant protein multiple mutations present on the individual LEAD molecules, so as to generate super-LEAD mutant proteins (see co-pending U.S. Published Application Nos. US 2005-0202438 A1 and US-2004-0132977-A1 and published PCT applications WO 2004/022747 and WO 2004/022593). ADM is a repetitive multi-step process where at each step after the creation of the first LEAD mutant protein a new LEAD mutation is added onto the previous LEAD mutant protein to create successive super-LEAD mutant proteins. ADM is not based on genetic recombination mechanisms, nor on shuffling methodologies; instead, it is a simple one-mutation-at-a-time process, repeated as many times as necessary until the total number of desired mutations is introduced on the same molecule. To avoid the exponentially increasing number of all possible combinations that can be generated by putting together on the same molecule a given number of single mutations, a method is provided herein that, although it does not cover all the combinatorial possible space, still captures a big part of the combinatorial potential. “Combinatorial” is used herein in its mathematical meaning (i.e., subsets of a group of elements, containing some of the elements in any possible order) and not in the molecular biological or directed evolution meaning (i.e., generating pools, or mixtures, or collections of molecules by randomly mixing their constitutive elements).

[0492] A population of sets of nucleic acid molecules encoding a collection of new super-LEAD mutant molecules is generated tested and phenotypically characterized one-by-one in addressable arrays. Super-LEAD mutant molecules are such that each molecule contains a variable number and type of LEAD mutations. Those molecules displaying further improved fitness for the particular feature being evolved are referred to as super-LEADs. Super-LEADs can be generated by other methods known to those of skill in the art and tested by the high throughput methods herein. For purposes herein a super-LEAD typically has activity with respect to the function or biological activity of interest that differs from the improved activity of a LEAD by a desired amount, such as at least about or 1%, 2%, 3%, 4%, 5%, 6%, 7%, 8%, 9%, 10%, 20%, 30%, 40%, 50%, 60%, 70%, 80%, 90%, 91%, 92%, 93%, 94%, 95%, 96%, 97%, 98%, 99%, 100%, 200%, 300%, 400%, 500%, or more from at least one of the LEAD mutants from which it is derived. In yet other embodiments, the change in activity is at least about 2 times, 3 times, 4 times, 5 times, 6 times, 7 times, 8 times, 9 times, 10 times, 20 times, 30 times, 40 times, 50 times, 60 times, 70 times, 80 times, 90 times, 100 times, 200 times, 300 times, 400 times, 500 times, 600 times, 700 times, 800 times, 900 times, 1000 times, or more greater than at least one of the LEAD molecules from which it is derived. As with LEADs, the change in the activity for super-LEADs is dependent upon the property that is being “evolved.” The desired alteration, which can be either an increase or a reduction in a feature or property, will depend upon the function or property of interest.

[0493] In one embodiment, the ADM method employs a number of repetitive steps, such that at each step a new mutation is added on a given molecule. Although numerous different ways are possible for combining each LEAD mutation onto a super-LEAD protein, an exemplary way the new mutations (e.g., mutation 1 (m1), mutation 2 (m2), mutation 3 (m3), mutation 4 (m4), mutation 5 (m5), mutation n (mn)) can be added corresponds to the following diagram:

[0494] m1

[0495] m1+m2

[0496] m1+m2+m3

[0497] m1+m2+m3+m4

[0498] m1+m2+m3+m4+m5

[0499] m1+m2+m3+m4+m5+ . . . +mn

[0500] m1+m2+m4

[0501] m1+m2+m4+m5

[0502] m1+m2+m4+m5+ . . . +mn

[0503] m1+m2+m5

[0504] m1+m2+m5+ . . . +mn

[0505] m2

[0506] m2+m3

[0507] m2+m3+m4

[0508] m2+m3+m4+m5

[0509] m2+m3+m4+m5+ . . . +mn

[0510] m2+m4

[0511] m2+m4+m5

[0512] m2+m4+m5+ . . . +mn

[0513] m2+m5

[0514] m2+m5+ . . . +nm

[0515] . . . , etc. . . .

[0516] 5. Multi-Overlapped Primer Extensions

[0517] Another method that can be employed to generate combinations of two or more mutations is using oligonucleotide-mediated mutagenesis referred to as “multi overlapped primer extensions”. This method can be used for the rational combination of mutant LEADs to form super-LEADS. This method allows the simultaneous introduction of several mutations throughout a small protein or protein-region of known sequence. Overlapping oligonucleotides of typically around 70 bases in length (since longer oligonucleotides lead to increased error) are designed from the DNA sequence (gene) encoding the mutant LEAD proteins in such a way that they overlap with each other on a region of typically around 20 bases. Although typically about 70 bases are used to create the overlapping oligonucleotides, the length of additional overlapping oligonucleotides for use can range from about 30 bases up to about 100 bases. Likewise, although typically the overlapping region of the overlapping oligonucleotides is about 20 bases, the length of other overlapping regions for use herein can range from about 5 bases up to about 40 bases. These overlapping oligonucleotides (including or not point mutations) act as template and primers in a first step of PCR (using a proofreading polymerase, e.g., Pfu DNA polymerase, to avoid unexpected mutations) to create small amounts of full-length gene. The full-length gene resulting from the first PCR is then selectively amplified in a second step of PCR using flanking primers, each one tagged with a restriction site in order to facilitate subsequent cloning. One multi overlapped extension process yields a full-length (multi-mutated) nucleic acid molecule encoding a candidate super-LEAD protein having multiple mutations therein derived from LEAD mutant proteins.

### F. ASSESSMENT OF EPO VARIANTS WITH INCREASED RESISTANCE TO PROTEOLYSIS

[0518] Increased resistance to proteolysis of EPO variants can be assessed by any methods known in the art to assess protein stability, thermal tolerance, protease sensitivity, and resistance and/or EPO activity. In one example, protease resistance is measured by incubating a modified EPO polypeptide with one or more proteases and then assessing residual activity compared to an untreated control. A modified EPO can be compared with an unmodified and/or wild-type native EPO treated under similar conditions to determine if the particular variant retains more activity than the unmodified EPO. Activity can be assessed by any methods known in the art, for example by measuring erythropoietic or tissue protective activities.

[0519] Kinetic studies of protease resistance also can be used to assess a modified EPO polypeptide. For example, a modified EPO polypeptide is incubated with one or more proteases and samples are taken over a series of time-points. At each time point, the proteases are inactivated and the samples are then tested for EPO activity. In one embodiment, the modified polypeptide is at least about or 1%, 2%, 3%, 4%, 5%, 6%, 7%, 8%, 9%, 10%, 20%, 30%, 40%, 50%, 60%, 70%, 80%, 90%, 91%, 92%, 93%, 94%, 95%, 96%, 97%, 98%, 99%, 100%, 200%, 300%, 400%, 500%, or more resistant to proteolysis.

[0520] In one exemplary embodiment, EPO variants are assessed for protease resistance with a mixture of proteases and proteolytic conditions including pepsin, trypsin, chymotrypsin, elastase, aminopeptidase, gelatinase B, gelatinase A, α-chymotrypsin, carboxypeptidase, endoproteinase Arg-C, endoproteinase Asp-N, endoproteinase Glu-C, endoproteinase Lys-C, luminal pepsin, microvillar endopeptidase, dipeptidyl peptidase, enteropeptidase, hydrolase, NS3, factor Xa, Granzyme B, thrombin, plasmin, urokinase, tPA and PSA. For example, a cell proliferation assay can be used to assess erythropoietic activity of modified EPO polypeptides compared to unmodified EPO polypeptides. Specifically, erythrocyte cell proliferation activity of EPO can be determined by the capacity of the modified EPO polypeptides to induce cell proliferation in an erythrocyte cell proliferation assay, such as a TF-1 proliferative assay. The resistance of the modified EPO polypeptides compared to wild-type EPO against enzymatic cleavage can be analyzed by mixing EPO polypeptides with proteases. After exposure to proteases, erythropoietic or tissue protective activities can be assessed.

[0521] In one example, erythropoietic activity of modified EPO is assessed in an assay by measuring the capacity of the modified EPO to modulate cell proliferation when added to the sample. Prior to the measurement of activity, EPO polypeptides can be challenged with proteases (e.g., blood, intestinal, etc.) including conditions mimicking administered conditions, such as serum, blood, saliva, or digestive assays (i.e., in vitro assays), and/or administered to a subject such as a mouse or human (i.e., in vivo assays) during different incubation or post-injection times. The activity measured, corresponds then to the residual activity following exposure to the proteolytic mixtures. Activity can be compared with an unmodified EPO as a measurement of the effect of the modification on protease stability and on the activity.

[0522] In one example, the unmodified EPO is a wild-type native EPO. In another example, the unmodified EPO is a variant form of EPO that was used as a starting material to introduce further modifications. Modified EPO polypeptides also can be compared with any known EPO polypeptide in any assay known in the art to compare protease sensitivity, thermal tolerance and/or any other activity.

### G. PRODUCTION OF EPO POLYPEPTIDES AND OTHER THERAPEUTIC POLYPEPTIDES

[0523] 1. Expression Systems

[0524] EPO polypeptides and other therapeutic polypeptides (modified and unmodified) can be produced by any methods known in the art for protein production, including the introduction of nucleic acid molecules encoding an EPO polypeptide or other therapeutic polypeptide into a host cell, host animal and expression from nucleic acid molecules encoding an EPO polypeptide or other therapeutic polypeptide in vitro. Expression hosts include E. coli, yeast, plants, insect cells, mammalian cells, including human cell lines and transgenic animals. Expression hosts can differ in their protein production levels as well as the types of post-translational modifications that are present on the expressed proteins. The choice of expression host can be made based on these and other factors, such as regulatory and safety considerations, production costs and the need and methods for purification.

[0525] Expression in eukaryotic hosts can include expression in yeasts such as Saccharomyces cerevisiae and Pichia Pastoria, insect cells such as Drosophila cells and lepidopteran cells, plants and plant cells such as tobacco, corn, rice, algae, and lemna. Eukaryotic cells for expression also include mammalian cells lines such as Chinese hamster ovary (CHO) cells or Baby hamster kidney (BHK) cells. Eukaryotic expression hosts also include production in transgenic animals, for example, including production in serum, urine, milk and eggs. Transgenic animals for the production of wild-type EPO polypeptides and other therapeutic polypeptides or EPO fusion polypeptides and other therapeutic fusion polypeptides are known in the art and can be adapted for production of modified EPO polypeptides and other modified therapeutic polypeptides provided herein (see e.g., Mikus et al. (2004) Transgenic Res. 13(5): 487-98; Korhonen et al. (1997) Eur. J. Biochem. 245: 482-489; Kwon et al. (2006) Transgenic Res. 15(1): 37-55).

[0526] Many expression vectors are available for the expression of EPO polypeptides and other therapeutic polypeptides. The choice of expression vector is influenced by the choice of host expression system. Such selection is well within the level of skill of the skilled artisan. In general, expression vectors can include transcriptional promoters and optionally enhancers, translational signals, and transcriptional and translational termination signals. Expression vectors that are used for stable transformation typically have a selectable marker which allows selection and maintenance of the transformed cells. In some cases, an origin of replication can be used to amplify the copy number of the vectors in the cells.

[0527] Methods of production of EPO polypeptides and other therapeutic polypeptides can include co-expression of one or more additional heterologous polypeptides that can aid in the generation of the EPO polypeptides and other therapeutic polypeptides. For example, such polypeptides can contribute to cleavage of the signal peptide or aid in the secretion or post-translation processing of the EPO polypeptides or other therapeutic polypeptides (e.g., glycosylation). The one or more additional polypeptides can be expressed from the same expression vector as the EPO polypeptide or other therapeutic polypeptide or from a different vector.

[0528] a. Prokaryotic Expression

[0529] Prokaryotes, especially E. coli, provide a system for producing large amounts of EPO polypeptides and other therapeutic polypeptides (see, for example, Platis et al. (2003) Protein Exp. Purif. 31(2): 222-30; and Khalizzadeh et al. (2004) J. Ind. Microbiol. Biotechnol. 31(2): 63-69). Transformation of E. coli is a simple and rapid technique well known to those of skill in the art. Expression vectors for E. coli can contain inducible promoters that are useful for inducing high levels of protein expression and for expressing proteins that exhibit some toxicity to the host cells. Examples of inducible promoters include the lac promoter, the trp promoter, the hybrid tac promoter, the T7 and SP6 RNA promoters and the temperature regulated λP_{L} promoter.

[0530] EPO polypeptides and other therapeutic polypeptides can be expressed in the cytoplasmic environment of E. coli. The cytoplasm is a reducing environment and for some molecules, this can result in the formation of insoluble inclusion bodies. Reducing agents such as dithiothreitol and β-mercaptoethanol and denaturants (e.g., such as guanidine-HCl and urea) can be used to resolubilize the proteins. An alternative approach is the expression of EPO polypeptides or other therapeutic polypeptides in the periplasmic space of bacteria which provides an oxidizing environment and chaperonin-like and disulfide isomerases leading to the production of soluble protein. Typically, a leader sequence is fused to the protein to be expressed which directs the protein to the periplasm. The leader is then removed by signal peptidases inside the periplasm. Examples of periplasmic-targeting leader sequences include the pelB leader from the pectate lyase gene and the leader derived from the alkaline phosphatase gene. In some cases, periplasmic expression allows leakage of the expressed protein into the culture medium. The secretion of proteins allows quick and simple purification from the culture supernatant. Proteins that are not secreted can be obtained from the periplasm by osmotic lysis. Similar to cytoplasmic expression, in some cases proteins can become insoluble and denaturants and reducing agents can be used to facilitate solubilization and refolding. Temperature of induction and growth also can influence expression levels and solubility. Typically, temperatures between 25° C. and 37° C. are used. Mutations also can be used to increase solubility of expressed proteins. Typically, bacteria produce aglycosylated proteins. Thus, if proteins require glycosylation for function, glycosylation can be added in vitro after purification from host cells.

[0531] b. Yeast

[0532] Yeasts such as Saccharomyces cerevisiae, Schizosaccharomyces pombe, Yarrowia lipolytica, Kluyveromyces lactis, and Pichia pastoris are useful expression hosts for EPO polypeptides and other therapeutic polypeptides (see for example, Skoko et al. (2003) Biotechnol. Appl. Biochem. 38(Pt3):257-65). Yeast can be transformed with episomal replicating vectors or by stable chromosomal integration by homologous recombination. Typically, inducible promoters are used to regulate gene expression. Examples of such promoters include GAL1, GAL7, and GAL5 and metallothionein promoters such as CUP1. Expression vectors often include a selectable marker such as LEU2, TRP1, HIS3, and URA3 for selection and maintenance of the transformed DNA. Proteins expressed in yeast are often soluble and co-expression with chaperonins, such as Bip and protein disulfide isomerase, can improve expression levels and solubility. Additionally, proteins expressed in yeast can be directed for secretion using secretion signal peptide fusions such as the yeast mating type alpha-factor secretion signal from Saccharomyces cerevisiae and fusions with yeast cell surface proteins such as the Aga2p mating adhesion receptor or the Arxula adeninivorans glucoamylase. A protease cleavage site (e.g., the Kex-2 protease) can be engineered to remove the fused sequences from the polypeptides as they exit the secretion pathway. Yeast also is capable of glycosylation at Asn-X-Ser/Thr motifs.

[0533] c. Insects and Insect Cells

[0534] Insects and insect cells, particularly using a baculovirus expression system, are useful for expressing polypeptides such as EPO polypeptides and other therapeutic polypeptides (see, e.g., Quelle et al. (1992) Protein Expr. Purif. 3(6): 461-9). Insect cells and insect larvae, including expression in the haemolymph, express high levels of protein and are capable of most of the post-translational modifications used by higher eukaryotes. Baculoviruses have a restrictive host range which improves the safety and reduces regulatory concerns of eukaryotic expression. Typically, expression vectors use a promoter such as the polyhedrin promoter of baculovirus for high level expression. Commonly used baculovirus systems include baculoviruses such as Autographa californica nuclear polyhedrosis virus (AcNPV), and the bombyx mori nuclear polyhedrosis virus (BmNPV) and an insect cell line such as Sf9 derived from Spodoptera frugiperda, Pseudaletia unipuncta (A7S) and Danaus plexippus (DpN1). For high level expression, the nucleotide sequence of the molecule to be expressed is fused immediately downstream of the polyhedrin initiation codon of the virus. Mammalian secretion signals are accurately processed in insect cells and can be used to secrete the expressed protein into the culture medium. In addition, the cell lines Pseudaletia unipuncta (A7S) and Danaus plexippus (DpN1) produce proteins with glycosylation patterns similar to mammalian cell systems.

[0535] An alternative expression system in insect cells is the use of stably transformed cells. Cell lines such as the Schnieder 2 (S2) and Kc cells (Drosophila melanogaster) and C7 cells (Aedes albopictus) can be used for expression. The Drosophila metallothionein promoter can be used to induce high levels of expression in the presence of heavy metal induction with cadmium or copper. Expression vectors are typically maintained by the use of selectable markers such as neomycin and hygromycin.

[0536] d. Mammalian Cells

[0537] Mammalian expression systems can be used to express EPO polypeptides and other therapeutic polypeptides. Expression constructs can be transferred to mammalian cells by viral infection, such as adenovirus or vaccinia virus, or by direct DNA transfer such as liposomes, calcium phosphate, DEAE-dextran and by physical means such as electroporation and microinjection. Expression vectors for mammalian cells typically include an mRNA cap site, a TATA box, a translational initiation sequence (Kozak consensus sequence) and polyadenylation elements. Such vectors often include transcriptional promoter-enhancers for high level expression, for example the SV40 promoter-enhancer, the human cytomegalovirus (CMV) promoter, and the long terminal repeat of Rous sarcoma virus (RSV). These promoter-enhancers are active in many cell types. Tissue and cell-type promoters and enhancer regions also can be used for expression. Exemplary promoter/enhancer regions include, but are not limited to, those from genes such as elastase I, insulin, immunoglobulin, mouse mammary tumor virus, albumin, alpha-fetoprotein, alpha 1-antitrypsin, beta-globin, myelin basic protein, myosin light chain-2, and gonadotropic releasing hormone gene control. Selectable markers can be used to select for and maintain cells with the expression construct. Examples of selectable marker genes include, but are not limited to, hygromycin B phosphotransferase, adenosine deaminase, xanthine-guanine phosphoribosyl transferase, aminoglycoside phosphotransferase, dihydrofolate reductase and thymidine kinase. Fusion with cell surface signaling molecules such as TCR-ζ and Fc_{ε}RI-γ can direct expression of the proteins in an active state on the cell surface.

[0538] Many cell lines are available for mammalian expression including mouse, rat human, monkey, and chicken and hamster cells. Exemplary cell lines include, but are not limited to, CHO, VERO, BHK, HT1080, MDCK, W138, Balb/3T3, HeLa, MT2, mouse NS0 (non-secreting) and other myeloma cell lines, hybridoma and heterohybridoma cell lines, lymphocytes, RPMI 1788 cells, fibroblasts, Sp2/0, COS, NIH3T3, HEK293, 293S, 2B8, EBNA-1, and HKB cells (see e.g. U.S. Pat. Nos. 5,618,698, 6,777,205). Cell lines also are available adapted to serum-free media which facilitates purification of secreted proteins from the cell culture media (e.g., EBNA-1, Pham et al., (2003) Biotechnol. Bioeng. 84:332-42). Expression of recombinant wild-type EPO polypeptides exhibiting similar structure and post-translational carbohydrate modifications as urine-derived EPO are known in the art, some of which exhibit differences in sialyl moiety linkages (see, e.g., Takeuchi et al. (1988) J. Biol. Chem. 263(8): 3657-3663; Inoue et al. (1995) Biotechnol. Annu. Rev. 1: 297-313). Methods of optimizing erythropoietin expression also are known in the art (e.g., Tsao et al. (1992) Ann N Y Acad. Sci. 665: 127-36; Wang et al. (2002) Biotechnol Bioeng. 77: 194-203; Sethuraman and Stadheim (2006) Curr. Opin. Biotech. 17:341-346; Yoon et al. (2001) Biomed. Life Sci. 37(2) 119-132)

[0539] e. Plants

[0540] Transgenic plant cells and plants can be used for the expression of EPO polypeptides and other therapeutic polypeptides. Expression constructs are typically transferred to plants using direct DNA transfer such as microprojectile bombardment and PEG-mediated transfer into protoplasts, and with agrobacterium-mediated transformation. Expression vectors can include promoter and enhancer sequences, transcriptional termination elements, and translational control elements (e.g., Ti plasmid). Expression vectors and transformation techniques are usually divided between dicot hosts, such as Arabidopsis and tobacco, and monocot hosts, such as corn and rice. Examples of plant promoters used for expression include the cauliflower mosaic virus promoter, the nopaline synthase promoter, the ribose bisphosphate carboxylase promoter and the ubiquitin and UBQ3 promoters. Selectable markers such as hygromycin, phosphomannose isomerase and neomycin phosphotransferase are often used to facilitate selection and maintenance of transformed cells. Transformed plant cells can be maintained in culture as cells, aggregates (callus tissue) or regenerated into whole plants. Transgenic plant cells also can include algae engineered to produce proteins (see, for example, Mayfield et al. (2003) PNAS 100:438-442). Plant cell systems for expression also include plants infected with virus expression vectors, for example, cauliflower mosaic virus (CaMV) or tobacco mosaic virus (TMV). Because plants have different glycosylation patterns than mammalian cells, this can influence the choice to produce EPO in these hosts.

[0541] 2. Purification

[0542] Methods for purification of EPO polypeptides and other therapeutic polypeptides from host cells depend on the chosen host cells and expression systems. For secreted molecules, proteins are generally purified from the culture media after removing the cells. For intracellular expression, cells can be lysed and the proteins purified from the extract. When transgenic organisms such as transgenic plants and animals are used for expression, tissues or organs can be used as starting material to make a lysed cell extract. Additionally, transgenic animal production can include the production of polypeptides in milk or eggs, which can be collected, and if necessary the proteins can be extracted and further purified using standard methods in the art.

[0543] EPO polypeptides and other therapeutic polypeptides can be purified using standard protein purification techniques known in the art including but not limited to, SDS-PAGE, differential precipitation, diafiltration, ultrafiltration, column electrofocusing, flat-bed electrofocusing, gel filtration, isotachophoresis, size fractionation, ammonium sulfate precipitation, high performance liquid chromatography, chelate chromatography, adsorption chromatography, ionic exchange chromatography, hydrophobic interaction chromatography, and molecular exclusion chromatography. Affinity purification techniques also can be used to improve the efficiency and purity of the preparations. For example, antibodies, receptors and other molecules that bind EPO or other therapeutic polypeptides can be used in affinity purification. Expression constructs also can be engineered to add an affinity tag such as a myc epitope, GST fusion or His₆ and affinity purified with myc antibody, glutathione resin, and Ni-resin, respectively, to a protein. Purity can be assessed by any method known in the art including gel electrophoresis and staining and spectrophotometric techniques. Exemplary techniques for the purification of EPO polypeptides and other therapeutic polypeptides are known in the art and can be found, for example, in U.S. Pat. Nos. 4,377,513, 4,667,016, 4,677,195, 5,733,761, 6,682,910, 7,012,130; Miyake et al. (1977) J. Biol. Chem. 252(15) 5558-5564; Spivak et al. (1977) Proc. Natl. Acad. Sci. USA 74(10): 4633-4635.

[0544] 3. Fusion Proteins

[0545] In some embodiments, a modified EPO polypeptide or other therapeutic polypeptide further comprises a heterologous polypeptide (e.g., a fusion partner) to form a fusion protein or is linked to a polypeptide via a linker, such as by chemical means. Suitable fusion partners include peptides and polypeptides that confer enhanced stability in vivo (e.g., enhanced serum half-life); provide ease of purification, e.g., histidine tags (His)ₙ, (e.g., 6×His, and the like); provide for secretion of the fusion protein from a cell; provide an epitope tag (e.g., GST, hemagglutinin (HA), FLAG, c-myc, and the like); provide a detectable signal (e.g., an enzyme that generates a detectable product (e.g., β-galactosidase, luciferase)), or a protein that is itself detectable (e.g., a green fluorescent protein (GFP), etc.); provide for multimerization (e.g., a multimerization domain such as an Fc portion of an immunoglobulin); and the like.

[0546] Fusion proteins containing a targeting agent and a modified EPO polypeptide or other modified therapeutic polypeptides also are provided. Pharmaceutical compositions containing such fusion proteins formulated for administration by a suitable route also are provided, for example, in particular, for oral administration. Fusion proteins are formed by linking in any order the modified EPO polypeptide or other therapeutic polypeptide and an agent, such as an antibody or fragment thereof, growth factor, receptor, ligand, and other such agent for directing the mutant protein to a targeted cell or tissue. Linkage can be effected directly or indirectly via a linker. The fusion proteins can be produced recombinantly or chemically by chemical linkage, such as via heterobifunctional agents or thiol linkages or other such linkages. Such fusion proteins are often referred to as protein conjugates. Linkers and linkages that are suitable for chemically linked conjugates include, but are not limited to, disulfide bonds, thioether bonds, hindered disulfide bonds, and covalent bonds between free reactive groups, such as amine and thiol groups. These bonds are produced using heterobifunctional reagents to produce reactive thiol groups on one or both of the polypeptides and then reacting the thiol groups on one polypeptide with reactive thiol groups or amine groups to which reactive maleimido groups or thiol groups can be attached on the other. Exemplary groups for use in heterobifunctional cross-linking reagents include, but are not limited to, aryl azides, maleimides, carbodiimides, N-hydroxysuccinimide (NHS)-esters, hydrazides, PFP-esters, hydroxymethyl phosphines, psoralens, imidoesters, pyridyl disulfides, isocyanates, and vinyl sulfones.

[0547] The fusion proteins can contain additional components, such as E. coli maltose binding protein (MBP) that aid in solubility, folding, purification, and uptake of proteins by cells. In another embodiment the modified EPO is fused to polypeptides that aid in stability, such as albumin (See e.g., U.S. Patent Publication Nos. 6,987,006, 6,548,653, 7,101,971; U.S. Patent Publication No. 2004-0063635, 2006-0058236; Albupoietin™ CoGenesys).

[0548] Optionally, a modified EPO polypeptide or other therapeutic polypeptide can be prepared in a multimeric form, by, for example, expressing as an Fc fusion protein or fusion with another multimerization domain. EPO fusion polypeptides and other therapeutic fusion polypeptides also can include fusion, or dimerization/multimerization, of two or more therapeutic polypeptides (see e.g., U.S. Pat. No. 5,580,853; Sytkowski (1999) J. Biol. Chem. 274(35): 24773-24778). Dimerization or multimerization can be effected directly (e.g., a single polypeptide with two or more EPO molecules in tandem arrangement) or indirectly via a linker (e.g., a hetero- or homo-bifunctional crosslinking agent) or fusion of the EPO polypeptides or other therapeutic polypeptides to a pair of polypeptides that have the ability to dimerize or can be dimerized via chemical means. In the latter example, the polypeptides that are fused to the EPO polypeptides or other therapeutic polypeptides can be identical polypeptides or different polypeptides (e.g., two proteins that can bind one another). Exemplary multimerization domains are known in the art and include, but are not limited to, Fc domains, or similar antibody-like fragments, leucine zipper motifs, a coiled coil domain, a hydrophobic region, a hydrophilic region, a polypeptide comprising a free thiol which forms an intermolecular disulfide bond between two or more multimerization domains, or a “protuberance-into-cavity” domain (see e.g., WO 94/10308; U.S. Pat. No. 5,731,168, Lovejoy et al. (1993), Science 259: 1288-1293; Harbury et al. (1993), Science 262: 1401-05; Harbury et al. (1994), Nature 371:80-83; Hakansson et al. (1999), Structure 7: 255-64.

[0549] Additional exemplary EPO fusion proteins and other therapeutic fusion polypeptides and methods of production are provided in the art and include, for example, but not limited to, Fc fusions and beta-lactoglobulin fusions, (U.S. Pat. Nos. 6,992,174, 6,165,476; U.S. Patent Publication No. 2003-0064480, 2005-0202538, 2005-0192211; Korhonen et al. (1997) Eur. J. Bioch. 245: 482-489). When constructed together with a therapeutic protein, an Fc domain can provide longer half-life or incorporate such functions as Fc receptor binding, dimerization, protein A binding, complement fixation and perhaps even placental transfer. In such fusion proteins, the properties of the EPO polypeptide and other therapeutic polypeptides can be further improved by one or more further modifications. In one non-limiting example, modifications such as H32G, C33, W88C, and P90A of an EPO polypeptide that result in rearrangement of the disulfide bonding pattern from Cys29-Cys33 to Cys29-Cys88, in the context of an Fc-Epo fusion protein, can lead to significantly improved properties (see e.g., Way et al. (2005) Protein Eng. Des. Sel. 18(3): 111-8). Furthermore, fusion proteins of modified EPO polypeptides and other therapeutic polypeptides provided herein can be combined with additional modifications of an EPO polypeptide or other therapeutic polypeptides as described herein (e.g., mutation, glycosylation, PEGylation, HASylation, etc.) or known in the art.

[0550] 4. Polypeptide Modification

[0551] Modified EPO polypeptides and other therapeutic polypeptides can be prepared as naked polypeptide chains or as a complex. For some applications, it can be desirable to prepare modified EPO or other modified therapeutic polypeptides in a “naked” form without post-translational or other chemical modifications. Naked polypeptide chains can be prepared in suitable hosts that do not post-translationally modify the therapeutic polypeptide. Such polypeptides also can be prepared in in vitro systems and using chemical polypeptide synthesis. For other applications, particular modifications can be desired including pegylation, albumination, glycosylation, carboxylation, hydroxylation, phosphorylation, or other known modifications. Modifications can be made in vitro or, for example, by producing the modified EPO and other therapeutic polypeptides in a suitable host that produces such modifications.

[0552] 5. Nucleotide Sequences

[0553] Nucleic acid molecules encoding modified EPO polypeptides and other therapeutic polypeptides or fusion proteins thereof operationally linked to a promoter, such as an inducible promoter for expression in prokaryotic or eukaryotic cells, such as mammalian cells also are provided. Such promoters include, but are not limited to, prokaryotic, eukaryotic, or viral promoters. Selection of a promoter for expression in cells depends on the cell type employed for expression. Exemplary promoters for expression in mammalian cells include, but are not limited to, CMV and SV40 promoters; adenovirus promoters, such as the E2 gene promoter, which is responsive to the HPV E7 oncoprotein; a PV promoter, such as the PBV p89 promoter that is responsive to the PV E2 protein; and other promoters that are activated by the HIV or PV or oncogenes.

[0554] Modified EPO polypeptides and other therapeutic polypeptides provided herein also can be delivered to cells in gene transfer vectors. The transfer vectors can encode additional therapeutic agent(s) for treatment of diseases or disorders, such as treatments for hemophilia, inherited disorders and others for which EPO is administered. Transfer vectors encoding modified EPO polypeptides can be used systemically by administering the nucleic acid to a subject. For example, the transfer vector can be a viral vector, such as an adenoviral vector. Vectors encoding EPO or other therapeutic polypeptides also can be incorporated into stem cells and such stem cells administered to a subject, for example, by transplanting or engrafting the stem cells at sites for therapy. For example, mesenchymal stem cells (MSCs) can be engineered to express a modified EPO or other modified therapeutic polypeptide and such MSCs engrafted at a tumor site for therapy.

### H. ASSESSING MODIFIED EPO POLYPEPTIDE PROPERTIES AND ACTIVITIES

[0555] EPO activities and properties can be assessed in vitro and/or in vivo. Assays for such assessment are known to those of skill in the art and are known to correlate tested activities and results to therapeutic and in vivo activities. In one example, EPO variants can be assessed in comparison to unmodified and/or wild-type EPO. In other examples, a modified EPO polypeptide can be assessed for biological activity following in vitro or in vivo exposure to protein stability-altering conditions (i.e., exposure to proteases, or denaturing agents such as temperature or pH). In vitro assays include any laboratory assay known to one of skill in the art, such as for example, cell-based assays including erythropoiesis assays, cell viability assays, cell survival assays, protein assays, and molecular biology assays. In vivo assays include EPO assays in animal models as well as administration to humans. In some cases, activity of EPO in vivo can be determined by assessing blood, serum, or other bodily fluid for assay determinants. EPO variants also can be tested in vivo to assess an activity or property, such, stability (e.g., half-life) and therapeutic effect. Results of such assays can be used to assess parameters, such as, but not limited to, therapeutic effectiveness, dosage levels, administration protocols, and usefulness for the EPO-mediated disease or condition to be treated or a diagnostic assay.

[0556] Assays provided herein and known in the art for EPO properties and activities can be used to assess properties and activities of the modified EPO polypeptides provided herein in combination with one or more further modifications of the modified EPO polypeptide, including post-translational or chemical modification or amino acid substitutions, deletions, or additions in the primary amino acid sequence of the modified EPO polypeptide. Further modifications of a modified EPO polypeptide provided herein can be systematically introduced in an EPO polypeptide, and one or more activities can be empirically determined.

[0557] 1. In Vitro Assays

[0558] Exemplary in vitro assays include assays to assess polypeptide stability and activity. Stability assays include assays that assess protease resistance or other physical property indicative of stability of the polypeptide in vivo or in vitro. Stability also can be assessed by protein structure and conformational assays known in the art. Assays for activity include, but are not limited to, erythrocyte cell proliferation assays.

[0559] Concentrations of modified EPO polypeptides can be assessed by methods well-known in the art, including, but not limited to, Enzyme-Linked Immunosorbent Assays (ELISA), SDS-PAGE; Bradford, Lowry, BCA methods; UV absorbance, and other quantifiable protein labeling methods, such as, but not limited to, immunological, radioactive, fluorescent, and related methods.

[0560] Assessment of degradation products of proteolysis reactions, including cleavage of EPO polypeptides can be performed using standard methods well-known in the art including but not limited to, SDS-PAGE analysis, immunohistochemistry, immunoprecipitation, NH₂-terminal sequencing, chromogenic substrate cleavage, HPLC, and protein labeling. EPO polypeptides that have been exposed to proteases can be subjected to NH₂-terminal sequencing to determine location or changes in cleavage sites of the modified EPO polypeptides.

[0561] EPO polypeptides can be tested for binding to an EPO receptor. For example, EPO can be assessed for binding to an EPO receptor or EPO receptor fragment using any binding assay known in the art, including, but not limited to, immunoprecipitation, column purification, non-reducing SDS-PAGE, surface plasmon resonance (SPR), fluorescence resonance energy transfer (FRET), fluorescence polarization (FP), isothermal titration calorimetry (ITC), circular dichroism (CD), protein fragment complementation assays (PCA), Nuclear Magnetic Resonance (NMR) spectroscopy, light scattering, sedimentation equilibrium, small-zone gel filtration chromatography, gel retardation, Far-western blotting, fluorescence polarization, hydroxyl-radical protein footprinting, phage display, and various two-hybrid systems.

[0562] EPO polypeptides can be tested for erythropoietic activity by using assays well known in the art. For example, some of the assays include, but are not limited to, cell based assays, such as a TF-1 proliferation assay. TF-1 cells are a human erythroleukemic cell line that expresses EPO receptors. The proliferation of TF-1 cells, which is determined by the incorporation of tritiated thymidine, is a function of erythropoietic activity (Hammerlling et al., (1996) J. Pharm. Biomed. Anal. 14: 1455; Kitamura et al., (1989) J. Cellular Physiol. 140: 323). A similar assay can be performed using a FDCP-1 cell lines (see, e.g., Dexter et al. (1980) J. Exp. Med. 152: 1036-1047). FDCP-1 is a growth factor dependent murine multi-potential primitive hematopoietic progenitor cell line that can proliferate, but not differentiate, when supplemented with WEHI-3-conditioned media (a medium that contains IL-3, ATCC number TIB-68). For such experiments, the FDCP-1 cell line can be transfected with the human or murine EPO-R to produce FDCP-1-hEPO-R or FDCP-1-mEPO-R cell lines, respectively, that can proliferate, but not differentiate, in the presence of EPO. In one such assay, the cells are grown to half stationary density in the presence of the necessary growth factors (see, e.g., as described in U.S. Pat. No. 5,773,569 and U.S. Patent Publication No. 2005-0137329). The cells are then washed in PBS and starved for 16-24 hours in whole media without growth factors. After determining the viability of the cells (e.g., by trypan blue staining), stock solutions (in whole media without growth factors) are made to give about 10⁵ cells per 50 μL. Serial dilutions of the modified EPO polypeptides to be tested are made in 96-well tissue culture plates for a final volume of 50 μL per well. Cells (50 tit) are added to each well and the cells are incubated 24-48 hours, at which point the negative controls should die or be quiescent. Cell proliferation is then measured by techniques known in the art, such as an MTT assay which measures H³-thymidine incorporation as an indication of cell proliferation (see e.g., Mosmann (1983) J. Immunol. Meth. 65: 55-63). EPO modified polypeptides are evaluated on both the EPO-R-expressing cell line and a parental non-expressing cell line. The concentration of test polypeptide necessary to yield one half of the maximal cell proliferation is recorded as the EC₅₀.

[0563] In another exemplary assay, the cells are grown to stationary phase in EPO-supplemented medium, collected, and then cultured for an additional 18 hr in medium without EPO. The cells are divided into three groups of equal cell density: one group with no added polypeptide (negative control), a group with EPO (positive control), and an experimental group with the test modified EPO polypeptide. The cultured cells are then collected at various time points, fixed, and stained with a DNA-binding fluorescent dye (e.g., propidium iodide or Hoechst dye, both available from Sigma). Fluorescence is then measured, for example, using a FACS Scan Flow cytometer. The percentage of cells in each phase of the cell cycle can then be determined, for example, using the SOBR model of CelIFIT software (Becton Dickinson). Cells treated with EPO or an active modified EPO peptide will show a greater proportion of cells in S phase (as determined by increased fluorescence as an indicator of increased DNA content) relative to the negative control group.

[0564] In another exemplary assay, a murine pre-B-cell line expressing human EPO-R and further transfected with a fos promoter-driven luciferase reporter gene construct can be used. Upon exposure to EPO or another EPO-R agonist, such cells respond by synthesizing luciferase. Luciferase causes the emission of light upon addition of its substrate luciferin. Thus, the level of EPO-R activation in such cells can be quantitated via measurement of luciferase activity. The activity of a test polypeptide is measured by adding serial dilutions of the test polypeptide to the cells, which are then incubated for 4 hours. After incubation, luciferin substrate is added to the cells, and light emission is measured. The concentration of test polypeptide that results in a half-maximal emission of light is recorded as the EC₅₀.

[0565] In yet another assay, the procedure set forth in Krystal (1983) Exp. Hematol 11: 649-660 for a microassay based on H³-thymidine incorporation into spleen cells can be employed to ascertain the ability of the modified EPO polypeptides provided herein to promote cell proliferation. In brief, B6C3 F₁ mice are injected daily for two days with phenylhydrazine (60 mg/kg). On the third day, spleen cells are removed and their ability to proliferate over a 24 hour period ascertained using an MTT assay. The binding of EPO to EPO-R in an erythropoietin-responsive cell line induces tyrosine phosphorylation of both the receptor and numerous intracellular proteins, including Shc, vav and JAK2 kinase. Therefore, another in vitro assay measures the ability of modified EPO polypeptides provided herein to induce tyrosine phosphorylation of EPO-R and downstream intracellular signal transducer proteins. Active peptides, as identified by binding and proliferation assays described above, elicit a phosphorylation pattern nearly identical to that of EPO in erythropoietin-responsive cells. For this assay, FDC-P1/ER cells (Dexter, et al. (1980) J Exp Med 152: 1036-47) are maintained in EPO-supplemented medium and grown to stationary phase. These cells are then cultured in medium without EPO for 24 hr. A defined number of such cells is then incubated with a modified EPO polypeptide for approximately 10 min at 37° C. A control sample of cells with EPO also is run with each assay. The treated cells are then collected by centrifugation, resuspended in SDS lysis buffer, and subjected to SDS polyacrylamide gel electrophoresis. The electrophoresed proteins in the gel are transferred to nitrocellulose, and the phosphotyrosine containing proteins on the blot visualized by standard immunological techniques. For example, the blot can be probed with an anti-phosphotyrosine antibody (e.g., mouse anti-phosphotyrosine IgG from Upstate Biotechnology, Inc.), washed, and then probed with a secondary antibody (e.g., peroxidase labeled goat anti-mouse IgG from Kirkegaard & Perry Laboratories, Inc. (Washington, D.C.)). Thereafter, phosphotyrosine-containing proteins can be visualized by standard techniques including colorimetric, chemiluminescent, or fluorescent assays. For example, a chemiluminescent assay can be performed using the ECL Western Blotting System from Amersham.

[0566] Another cell-based in vitro assay that can be used to assess the activity of the modified EPO polypeptides provided herein is a colony assay, using murine bone marrow or human peripheral blood cells. Murine bone marrow can be obtained from the femurs of mice, while a sample of human peripheral blood can obtained from a healthy donor. In the case of peripheral blood, mononuclear cells are first isolated from the blood, for example, by centrifugation through a Ficoll-Hypaque gradient (Stem Cell Technologies, Inc. (Vancouver, Canada)). For this assay a nucleated cell count is performed to establish the number and concentration of nucleated cells in the original sample. A defined number of cells is plated on methyl cellulose as per manufacturer's instructions (Stem Cell Technologies, Inc. (Vancouver, Canada)). An experimental group is treated with a modified EPO polypeptide, a positive control group is treated with EPO, and a negative control group receives no treatment. The number of growing colonies for each group is then scored after defined periods of incubation, generally 10 days and 18 days. An active peptide will promote colony formation.

[0567] Other in vitro biological assays that can be used to demonstrate the activity of the modified EPO polypeptides provided herein are disclosed in Greenberger, et al. (1983) Proc. Natl. Acad. Sci. USA 80:2931-2935 (EPO-dependent hematopoietic progenitor cell line); Quelle and Wojchowski (1991) J. Biol. Chem. 266:609-614 (protein tyrosine phosphorylation in B6SUt.EP cells); Dusanter-Fourt, et al. (1992) J. Biol. Chem. 287:10670-10678 (tyrosine phosphorylation of EPO-receptor in human EPO-responsive cells); Quelle, et al. (1992) J. Biol. Chem. 267:17055-17060 (tyrosine phosphorylation of a cytosolic protein, pp 100, in FDC-ER cells); Worthington, et al. (1987) Exp. Hematol. 15:85-92 (colorimetric assay for hemoglobin); Kaiho and Miuno (1985) Anal. Biochem. 149:117-120 (detection of hemoglobin with 2,7-diaminofluorene); Patel, et al. (1992) J. Biol. Chem. 267:21300-21302 (expression of c-myb); Witthuhn, et al. (1993) Cell 74:227-236 (association and tyrosine phosphorylation of JAK2); Leonard, et al. (1993) Blood 82:1071-1079 (expression of GATA transcription factors); and Ando, et al. (1993) Proc. Natl. Acad. Sci. USA 90:9571-9575 (regulation of GI transition by cycling D2 and D3).

[0568] An instrument designed by Molecular Devices Corp., known as a microphysiometer, can be used for measurement of the effect of agonists and antagonists on various receptors. The basis for this apparatus is the measurement of the alterations in the acidification rate of the extracellular media in response to receptor activation.

[0569] EPO polypeptides provided herein also can be assessed for presence of post-translational modifications. Such assays are known in the art and include assays to measure glycosylation, hydroxylation, oxidation, sulfation, carboxylation, and phosphorylation. In an exemplary assay for glycosylation, carbohydrate analysis can be performed, for example, with SDS page analysis of EPO polypeptides exposed to hydrazinolysis or endoglycosidase treatment. Hydrazinolysis releases N- and O-linked glycans from glycoproteins by incubation with anhydrous hydrazine, while endoglycosidase release involves PNGase F, which releases most N-glycans from glycoproteins. Hydrazinolysis or endoglycosidase treatment of EPO polypeptides generates a reducing terminus that can be tagged with a fluorophore or chromophore label. Labeled EPO polypeptides can be analyzed by fluorophore-assisted carbohydrate electrophoresis (FACE). The fluorescent tag for glycans also can be used for monosaccharide analysis, profiling or fingerprinting of complex glycosylation patterns by HPLC. Exemplary HPLC methods include hydrophilic interaction chromatography, electronic interaction, ion-exchange, hydrophobic interaction, and size-exclusion chromatography. Exemplary glycan probes include, but are not limited to, 3-(acetylamino)-6-aminoacridine (AA-Ac) and 2-aminobenzoic acid (2-AA). Carbohydrate moieties also can be detected through use of specific antibodies that recognize the glycosylated EPO polypeptide (see e.g., Mi et al. (2006) J. Immunoassay Immunochem. 27(2): 115-128).

[0570] Structural properties of modified EPO polypeptides also can be assessed. For example, X-ray crystallography, nuclear magnetic resonance (NMR), and cryoelectron microscopy (cryo-EM) of modified EPO polypeptides can be performed to assess three-dimensional structure of the EPO polypeptides and/or other properties of EPO polypeptides, such as receptor binding and carbohydrate modification (see e.g., Cheetham et al. (1998) Nat. Struct. Biol. 5: 861-866; Watson et al. (1994) Glycobiology 4(2): 227-237).

[0571] 2. Non-Human Animal Models

[0572] Non-human animal models are can be used to assess activity and stability of modified EPO polypeptides. For example, non-human animals can be used as models for a disease or condition. Non-human animals can be injected with disease and/or phenotype-inducing substances prior to administration of EPO variants to monitor the effects on disease progression. Genetic models also are useful. Animals, such as mice, can be generated which mimic a disease or condition by the overexpression, underexpression or knock-out of one or more genes. Such animals can be generated by transgenic animal production techniques well-known in the art or using naturally-occurring or induced mutant strains. Examples of useful non-human animal models of diseases associated with EPO include, but are not limited to, models of anemia, including models of sickle cell anemia, acquired bone marrow failure syndromes, beta-thalassemia, acute anemia, aplastic anemia, pernicious anemia, and anemia induced by renal failure or cancer, in animals, such as mice, rats, rabbits, dogs, and primates (see e.g., Nagel (1998) N Engl J Med. 339(3): 194-5; Chen (2005) Clin. Med. Res. 3:102-108; Chen et al. (2004) Blood 104: 1671-1678; McMullin et al. (1989) Biochem Med Metab Biol. 41(1): 30-5; Alderuccio et al. (2002) Clin. Immun. 102(1): 48-58; Kawamura et al. (1990) Biotherapy 2(1): 77-85; Bohl et al. (2000) Blood 95: 2793-2798). These non-human animal models can be used to monitor activity of EPO variants compared to a wild type EPO polypeptide.

[0573] Animal models also can be used to monitor stability, half-life, and clearance of modified EPO polypeptides. Such assays are useful for comparing modified EPO polypeptides and for calculating doses and dose regimens for further non-human animal and human trials. For example, a modified EPO polypeptide can be injected into the tail vein of mice. Blood samples are then taken at time-points after injection (such as minutes, hours and days afterwards) and then the level of the modified EPO polypeptides in bodily samples including, but not limited to, serum or plasma can be monitored at specific time-points for example by ELISA or radioimmunoassay. Blood samples also can be tested for hematopoietic activity in methods, such as an erythrocyte proliferation assay.

[0574] Examples of in vivo assays include, but are not limited to, hematocrit (HCT) assays, iron uptake, and reticulocyte assays (see e.g., Cotes et al. (1961) Nature 191: 1065; U.S. Pat. No. 6,099,830). HCT assays measure the volume of red blood cells from a blood sample taken from an erythropoietin-treated animal, and are performed by centrifuging blood in capillary tubes and measuring the fraction of the total volume occupied by sedimented red blood cells. Reticulocyte assays measure new red blood cells, or reticulocytes, that have recently differentiated from precursor cells and that still have remnants of nucleic acids characteristic of the precursor cells. For this assay, normal untreated mice are subcutaneously injected on three consecutive days with either EPO or modified EPO peptide provided herein. On the third day, the mice also are intraperitoneally injected with iron dextran. At day five, blood samples are collected from the mice. The percent (%) of reticulocytes in the blood is determined by staining with a nucleic acid-staining dye such as acridine orange or thiazole orange, and flow cytometer analysis (retic-count program). Reticulocytes are measured by counting the positively-stained reticulocyte fraction. In addition, hematocrits are manually determined.

[0575] Another exemplary in vivo functional assay that can be used to assess the potency of a modified EPO peptide is the polycythemic exhypoxic mouse bioassay.

[0576] For this assay, mice are subjected to an alternating conditioning cycle for several days. In this cycle, the mice alternate between periods of hypobaric conditions and ambient pressure conditions. Thereafter, the mice are maintained at ambient pressure for 2-3 days prior to administration of test samples. Test modified EPO polypeptide samples, or EPO standard in the case positive control mice, are injected subcutaneously into the conditioned mice. Radiolabeled iron (e.g., ⁵⁹Fe) is administered 2 days later, and blood samples are taken two days after administration of radiolabeled iron. Hematocrits and radioactivity measurements are then determined for each blood sample by standard techniques. Blood samples from mice injected with active test peptides will show greater radioactivity (due to binding of ⁵⁹Fe by erythrocyte hemoglobin) than mice that did not receive modified EPO polypeptides or native EPO.

[0577] Modified EPO polypeptides also can be tested for immune tolerance using animal models. Animal models for immune tolerance, including primate and rodent models can be used to test long term expression of EPO via injection of polypeptides or gene transfer vectors. Blood samples taken at time-points after injection can be assessed for production of anti-EPO antibodies.

[0578] 3. Clinical Assays

[0579] Many assays are available to assess activity of EPO for clinical use. Such assays can include assessment of erythropoietic activity, tissue protective activity, protein stability, and half-life in vivo and phenotypic assays. Phenotypic assays and assays to assess the therapeutic effect of EPO treatment include assessment of blood levels of EPO (e.g., measurement of serum EPO prior to administration and time-points following administrations including, after the first administration, immediately after last administration, and time-points in between, correcting for the body mass index (BMI)), phenotypic response to EPO treatment including amelioration of symptoms over time compared to subjects treated with an unmodified and/or wild type EPO or placebo. Examples of clinical assays to assess EPO activity can be found, for example in Marsden (2006) Ann Clin Biochem 43: 97-104; Gascon (2005) Eur J Cancer 41(17): 2601-12; ANNA J. 1989 August; 16(5):344-8. Patients can be monitored regularly over a period of time for routine or repeated administrations, following administration in response to acute events, such as hemorrhage, trauma, or surgical procedures.

### I. FORMULATION/PACKAGING/ADMINISTRATION

[0580] Pharmaceutical compositions containing an optimized EPO variant or other therapeutic polypeptide produced using methods described herein, including EPO variant (modified) polypeptides, modified EPO fusion proteins or encoding nucleic acid molecules, can be formulated in any conventional manner by mixing a selected amount of the polypeptide with one or more physiologically acceptable carriers or excipients. Selection of the carrier or excipient is within the skill of the administering profession and can depend upon a number of parameters. These include, for example, the mode of administration (e.g., systemic (e.g., intravenous or intraperitoneal injection), oral, nasal, pulmonary, transdermal, parenteral, rectal, local, topical, or any other mode) and disorder treated. Compositions of EPO polypeptides and other therapeutic polypeptides can be formulated with additional factors, such as one or more therapeutic agents, useful in the disease or disorder to be treated. Such combinations of therapeutic agents for use in the compositions provided are described elsewhere herein. The pharmaceutical compositions provided herein can be formulated for single dosage (direct) administration or for dilution or other modification. The concentrations of the compounds in the formulations are effective for delivery of an amount, upon administration, that is effective for the intended treatment. Typically, the compositions are formulated for single dosage administration. To formulate a composition, the weight fraction of a compound or mixture thereof is dissolved, suspended, dispersed, or otherwise mixed in a selected vehicle at an effective concentration such that the treated condition is relieved or ameliorated. Pharmaceutical carriers or vehicles suitable for administration of the compounds provided herein include any such carriers known to those skilled in the art to be suitable for the particular mode of administration.

[0581] 1. Administration of Modified EPO Polypeptides and Other Modified Therapeutic Polypeptides

[0582] The polypeptides can be formulated as the sole pharmaceutically active ingredient in the composition or can be combined with other active ingredients. The polypeptides can be targeted for delivery, such as by conjugation to a targeting agent, such as an antibody. Liposomal suspensions, including tissue-targeted liposomes, also can be suitable as pharmaceutically acceptable carriers. These can be prepared according to methods known to those skilled in the art. For example, liposome formulations can be prepared as described, for example, in U.S. Pat. No. 6,645,522 or 6,726,924. Liposomal delivery also can include slow release formulations, including pharmaceutical matrices such as collagen gels and liposomes modified with fibronectin (see, for example, Weiner et al. (1985) J Pharm Sci. 74(9): 922-5).

[0583] The active compound is included in the pharmaceutically acceptable carrier in an amount sufficient to exert a therapeutically useful effect in the absence of undesirable side effects on the subject treated. The therapeutically effective concentration can be determined empirically by testing the compounds in known in vitro and in vivo systems, such as the assays provided herein. The active compounds can be administered by any appropriate route, for example, oral, nasal, pulmonary, parenteral, intravenous, intradermal, subcutaneous, or topical, in liquid, semi-liquid or solid form and are formulated in a manner suitable for each route of administration. In a particular embodiment, the EPO polypeptide or other therapeutic polypeptide is administered orally.

[0584] The modified EPO or other modified therapeutic polypeptide and physiologically acceptable salts and solvates can be formulated for administration by inhalation (either through the mouth or the nose), oral, transdermal, pulmonary, parenteral, or rectal administration. For administration by inhalation, the modified EPO and other modified therapeutic polypeptide can be delivered in the form of an aerosol spray presentation from pressurized packs or a nebulizer with the use of a suitable propellant, e.g., dichlorodifluoromethane, trichlorofluoromethane, dichlorotetrafluoroethane, carbon dioxide or other suitable gas. In the case of a pressurized aerosol, the dosage unit can be determined by providing a valve to deliver a metered amount. Capsules and cartridges of e.g., gelatin for use in an inhaler or insufflator can be formulated containing a powder mix of a therapeutic compound and a suitable powder base such as lactose or starch.

[0585] For pulmonary administration to the lungs, the modified EPO and other modified therapeutic polypeptide can be delivered in the form of an aerosol spray presentation from a nebulizer, turbonebulizer, or microprocessor-controlled metered dose oral inhaler with the use of a suitable propellant. Generally, the particle size is small, such as in the range of 0.5 to 5 microns. In the case of a pharmaceutical composition formulated for pulmonary administration, detergent surfactants are not typically used. Pulmonary drug delivery is a promising non-invasive method of systemic administration. The lungs represent an attractive route for drug delivery, mainly due to the high surface area for absorption, thin alveolar epithelium, extensive vascularization, lack of hepatic first-pass metabolism, and relatively low metabolic activity.

[0586] For oral administration, the pharmaceutical compositions can take the form of, for example, tablets, pills, liquid suspensions, or capsules prepared by conventional means with pharmaceutically acceptable excipients such as binding agents (e.g., pregelatinized maize starch, polyvinylpyrrolidone or hydroxypropyl methylcellulose); fillers (e.g., lactose, microcrystalline cellulose or calcium hydrogen phosphate); lubricants (e.g., magnesium stearate, talc or silica); disintegrants (e.g., potato starch or sodium starch glycolate); or wetting agents (e.g., sodium lauryl sulphate). The tablets can be coated by methods well known in the art. Liquid preparations for oral administration can take the form of, for example, solutions, syrups or suspensions, or they can be presented as a dry product for constitution with water or other suitable vehicle before use. Such liquid preparations can be prepared by conventional means with pharmaceutically-acceptable saline, pharmaceutically acceptable additives such as suspending agents (e.g., sorbitol syrup, cellulose derivatives or hydrogenated edible fats); emulsifying agents (e.g., lecithin or acacia); non-aqueous vehicles (e.g., almond oil, oily esters, ethyl alcohol or fractionated vegetable oils); and preservatives (e.g., methyl or propyl-p-hydroxybenzoates or sorbic acid). The preparations also can contain buffer salts, flavoring, coloring and sweetening agents as appropriate.

[0587] Preparations for oral administration can be suitably formulated to give controlled release of the active compound. For buccal administration the compositions can take the form of tablets or lozenges formulated in conventional manner.

[0588] The modified EPO polypeptides and other modified therapeutic polypeptides exhibit increased resistance to proteolysis and half-life in the gastrointestinal tract. Thus, preparations for oral administration can be suitably formulated without the use of protease inhibitors, such as a Bowman-Birk inhibitor, a conjugated Bowman-Birk inhibitor, aprotinin and camostat. Such compounds, however, are not excluded from use in the compositions provided.

[0589] The modified EPO polypeptides and other modified therapeutic polypeptides can be formulated as a depot preparation. Such long-acting formulations can be administered by implantation (for example, subcutaneously or intramuscularly) or by intramuscular injection. Thus, for example, the therapeutic compounds can be formulated with suitable polymeric or hydrophobic materials (for example as an emulsion in an acceptable oil) or ion exchange resins, or as sparingly soluble derivatives, for example, as a sparingly soluble salt.

[0590] The modified EPO polypeptides and other modified therapeutic polypeptides can be formulated, for example, for parenteral administration by injection (e.g., by bolus injection or continuous infusion. Formulations for injection can be presented in unit dosage form (e.g., in ampoules or in multi-dose containers) with an added preservative. The compositions can take such forms as suspensions, solutions or emulsions in oily or aqueous vehicles and can contain formulatory agents such as suspending, stabilizing and/or dispersing agents. Alternatively, the active ingredient can be in powder-lyophilized form for constitution with a suitable vehicle, e.g., sterile pyrogen free water, before use.

[0591] The active agents can be formulated for local or topical application, such as for topical application to the skin (transdermal) and mucous membranes, such as in the eye, in the form of gels, creams, and lotions and for application to the eye or for intracisternal or intraspinal application. Such solutions, particularly those intended for ophthalmic use, can be formulated as 0.01%-10% isotonic solutions and pH about 5-7 with appropriate salts. The compounds can be formulated for topical application (see, for example, U.S. Pat. Nos. 4,044,126, 4,414,209 and 4,364,923, which describe aerosols for delivery of a steroid useful for treatment inflammatory diseases, particularly asthma each of which is incorporated herein by reference in its entirety).

[0592] The concentration of active compound in the drug composition depends on absorption, inactivation and excretion rates of the active compound, the dosage schedule, and amount administered as well as other factors known to those of skill in the art. As described further herein, dosages can be determined empirically using dosages known in the art for administration of unmodified EPO or other unmodified therapeutic polypeptide, and comparisons of properties and activities (e.g., stability and activities) of the modified EPO or other modified therapeutic polypeptide compared to the unmodified and/or native EPO or other unmodified and/or native therapeutic polypeptides.

[0593] The compositions, if desired, can be presented in a package, in a kit or dispenser device, that can contain one or more unit dosage forms containing the active ingredient. The package, for example, contains metal or plastic foil, such as a blister pack. The pack or dispenser device can be accompanied by instructions for administration. The compositions containing the active agents can be packaged as articles of manufacture containing packaging material, an agent provided herein, and a label that indicates the disorder for which the agent is provided.

[0594] Among the modified EPO polypeptides and other modified therapeutic polypeptides provided herein are EPO polypeptides and other modified therapeutic polypeptides modified to increase stability to conditions amendable to oral delivery. Oral delivery can include administration to the mouth and/or gastrointestinal tract. Such modifications can include increased protein-half life under one or more conditions such as exposure to saliva, exposure to proteases in the gastrointestinal tract, and exposure to particular pH conditions, such as the low pH of the stomach and/or pH conditions in the intestine. Modifications can include resistance to one or more proteases including pepsin, trypsin, chymotrypsin, elastase, aminopeptidase, gelatinase B, gelatinase A, α-chymotrypsin, carboxypeptidase, endoproteinase Arg-C, endoproteinase Asp-N, endoproteinase Glu-C, endoproteinase Lys-C, and trypsin, luminal pepsin, microvillar endopeptidase, dipeptidyl peptidase, enteropeptidase, hydrolase, NS3, elastase, factor Xa, Granzyme B, thrombin, trypsin, plasmin, urokinase, tPA and PSA. Modifications also can include increasing overall stability to potentially denaturing or conformation-altering conditions such as thermal tolerance, and tolerance to mixing and aeration (e.g., chewing).

[0595] EPO polypeptides and other therapeutic polypeptides modified for suitability to oral delivery can be prepared using any of the methods described herein. For example, 2D- and 3D-scanning mutagenesis methods for protein rational evolution (see, co-pending U.S. Publication No. US 2005-0202438 A1 and U.S. Publication No. US-2004-0132977-A1 and published International applications WO 2004/022593 and WO 2004/022747) can be used to prepare modified EPO and other modified therapeutic polypeptides. Modification of EPO polypeptides and other modified therapeutic polypeptides for suitability for oral delivery can include removal of proteolytic digestion sites and/or increasing the overall stability of the protein structure. Such EPO variants and other modified therapeutic variants exhibit increased protein half-life compared to an unmodified and/or wild-type native EPO or other unmodified and/or wild-type native therapeutic polypeptides in one or more conditions for oral delivery. For example, a modified EPO or other therapeutic polypeptide can have increased protein half-life and/or bioavailability in the mouth, throat (e.g., through the mucosal lining), the gastrointestinal tract or systemically.

[0596] In one embodiment, the half-life of the modified EPO polypeptides provided herein is increased by an amount at least about or 1%, 2%, 3%, 4%, 5%, 6%, 7%, 8%, 9%, 10%, 20%, 30%, 40%, 50%, 60%, 70%, 80%, 90%, 91%, 92%, 93%, 94%, 95%, 96%, 97%, 98%, 99%, 100%, 200%, 300%, 400%, 500%, or more compared to the half-life of a native EPO polypeptide exposed to one or more conditions for oral delivery. In other embodiments, the half-life of the modified EPO polypeptides provided herein is increased by an amount of at least 6 times, 7 times, 8 times, 9 times, 10 times, 20 times, 30 times, 40 times, 50 times, 60 times, 70 times, 80 times, 90 times, 100 times, 200 times, 300 times, 400 times, 500 times, 600 times, 700 times, 800 times, 900 times, 1000 times, or more, compared to the half-life of native EPO exposed to one or more conditions for oral delivery.

[0597] In one example, half-life of the modified EPO polypeptide or other therapeutic polypeptides is assessed by increased half-life in the presence of one or more proteases such as pepsin, trypsin, chymotrypsin, elastase, aminopeptidase, gelatinase B, gelatinase A, α-chymotrypsin, carboxypeptidase, endoproteinase Arg-C, endoproteinase Asp-N, endoproteinase Glu-C, endoproteinase Lys-C, and trypsin, luminal pepsin, microvillar endopeptidase, dipeptidyl peptidase, enteropeptidase, hydrolase, NS3, elastase, factor Xa, Granzyme B, thrombin, trypsin, plasmin, urokinase, tPA and PSA. The modified EPO or other therapeutic polypeptides can be mixed with one or more proteases and then assessed for activity and/or protein structure after a suitable reaction time. Assessment of half-life also can include exposure to increased temperature, such as the body temperature of a subject; exposure to gastric juices and/or simulated gastric juices; exposure to particular pH conditions and/or a combination of two or more conditions. Following exposure to one or more conditions, activity and/or assessment of protein structure can be used to assess the half-life of the modified EPO or other modified therapeutic polypeptide in comparison to an appropriate control (i.e., an unmodified and/or wild-type EPO polypeptide).

[0598] The modified EPO polypeptides and other modified therapeutic polypeptides can be formulated for oral administration, such as in tablets, capsules, liquids or other suitable vehicle for oral administration. Preparation of pharmaceutical compositions containing a modified EPO or other modified therapeutic polypeptides for oral delivery can include formulating modified EPO polypeptides or other modified therapeutic polypeptides with oral formulations known in the art and described herein. The compositions as formulated do not require addition of protease inhibitors and/or other ingredients that are necessary for stabilization of unmodified and wild-type modified therapeutic polypeptides upon exposure of proteases, pH and other conditions of oral delivery. For example, such compositions exhibit stability in the absence of compounds such as actinonin or epiactinonin and derivatives thereof; Bowman-Birk inhibitor and conjugates thereof; aprotinin and camostat. Such compounds, however, are not excluded from use in the compositions provided.

[0599] Additionally, because modified EPO polypeptides and other modified therapeutic polypeptides provided herein exhibit increased protein stability, there is more flexibility in the administration of pharmaceutical compositions than their unmodified counterparts. Typically, orally ingested polypeptides are administered in the morning before eating (i.e., before digestive enzymes are activated). The modified polypeptides provided herein exhibit protease resistance to digestive enzymes and can offer the ability to administer pharmaceutical compositions containing a modified EPO polypeptide or other modified therapeutic polypeptide at other periods during the day and under conditions when digestive enzymes are present and active.

[0600] For oral administration, the pharmaceutical compositions can take the form of, for example, tablets or capsules prepared by conventional means with pharmaceutically acceptable excipients such as binding agents (e.g., pregelatinized maize starch, polyvinylpyrrolidone or hydroxypropyl methylcellulose); fillers (e.g., lactose, microcrystalline cellulose or calcium hydrogen phosphate); lubricants (e.g., magnesium stearate, talc or silica); disintegrants (e.g., potato starch or sodium starch glycolate); or wetting agents (e.g., sodium lauryl sulphate). The tablets can be coated by methods well known in the art. Liquid preparations for oral administration can take the form of, for example, solutions, syrups or suspensions, or they can be presented as a dry product for constitution with water or other suitable vehicle before use. Such liquid preparations can be prepared by conventional means with pharmaceutically acceptable additives such as suspending agents (e.g., sorbitol syrup, cellulose derivatives or hydrogenated edible fats); emulsifying agents (e.g., lecithin or acacia); non aqueous vehicles (e.g., almond oil, oily esters, ethyl alcohol or fractionated vegetable oils); and preservatives (e.g., methyl or propyl p hydroxybenzoates or sorbic acid). The preparations also can contain buffer salts, flavoring, coloring and/or sweetening agents as appropriate.

[0601] Preparations for oral administration can be formulated to give controlled or sustained release or for release after passage through the stomach or in the small intestine of the active compound. For oral administration the compositions can take the form of tablets, capsules, liquids, lozenges and other forms suitable for oral administration. Formulations suitable for oral administration include lozenges and other formulations that deliver the pharmaceutical composition to the mucosa of the mouth, throat and/or gastrointestinal tract. Lozenges can be formulated with suitable ingredients including excipients for example, anhydrous crystalline maltose and magnesium stearate. As noted, modified polypeptides described herein exhibit resistance to blood or intestinal proteases and can be formulated without additional protease inhibitors or other protective compounds. Preparations for oral administration also can include a modified EPO polypeptide or other modified therapeutic polypeptide resistant to proteolysis formulated with one or more additional ingredients that also confer proteases resistance, or confer stability in other conditions, such as particular pH conditions.

[0602] 2. Administration of Nucleic Acids Encoding Modified EPO Polypeptides or Other Modified Therapeutic Polypeptides (Gene Therapy)

[0603] Also provided are compositions of nucleic acid molecules encoding the modified EPO polypeptides or other modified therapeutic polypeptides and expression vectors encoding them that are suitable for gene therapy. Rather than deliver the protein, nucleic acid can be administered in vivo, such as systemically or by other route, or ex vivo, such as by removal of cells, including lymphocytes, introduction of the nucleic therein, and reintroduction into the host or a compatible recipient.

[0604] Modified EPO polypeptides and other modified therapeutic polypeptides can be delivered to cells and tissues by expression of nucleic acid molecules. Modified EPO polypeptides and other modified therapeutic polypeptides can be administered as nucleic acid molecules encoding modified EPO polypeptides or other modified therapeutic polypeptides, including ex vivo techniques and direct in vivo expression. Nucleic acids can be delivered to cells and tissues by any method known to those of skill in the art including, for example direct injection of naked DNA into tissues, such as skeletal muscle tissue, for expression (see e.g., Rizzuto et al. (1999) Proc Natl Acad Sci USA 96: 6417-6422). The isolated nucleic acid sequences can be incorporated into vectors for further manipulation. As used herein, vector (or plasmid) refers to discrete elements that are used to introduce heterologous DNA into cells for either expression or replication thereof. Selection and use of such vehicles are well within the skill of the artisan.

[0605] Methods for administering modified EPO polypeptides and other modified therapeutic polypeptides by expression of encoding nucleic acid molecules include administration of recombinant vectors. The vector can be designed to remain episomal, such as by inclusion of an origin of replication or can be designed to integrate into a chromosome in the cell. Modified EPO polypeptides and other modified therapeutic polypeptides also can be used in ex vivo gene expression therapy using non-viral vectors. For example, cells can be engineered to express a modified EPO polypeptide or other modified therapeutic polypeptides, such as by integrating a modified EPO polypeptide or other modified therapeutic polypeptide encoding-nucleic acid into a genomic location, either operatively linked to regulatory sequences or such that it is placed operatively linked to regulatory sequences in a genomic location. Such cells then can be administered locally or systemically to a subject, such as a patient in need of treatment.

[0606] Viral vectors, include, for example adenoviruses, adeno-associated viruses (AAV), poxviruses, herpes viruses, retroviruses and others designed for gene therapy can be employed. The vectors can remain episomal or can integrate into chromosomes of the treated subject. A modified EPO polypeptide or other modified therapeutic polypeptide can be expressed by a virus, which is administered to a subject in need of treatment. Viral vectors suitable for gene therapy include adenovirus, adeno-associated virus (AAV), retroviruses, lentiviruses, vaccinia viruses and others noted above. For example, adenovirus expression technology is well-known in the art and adenovirus production and administration methods also are well known. Adenovirus serotypes are available, for example, from the American Type Culture Collection (ATCC, Rockville, Md.). Adenovirus can be used ex vivo, for example, cells are isolated from a patient in need of treatment, and transduced with a modified EPO polypeptide-expressing adenovirus vector. After a suitable culturing period, the transduced cells are administered to a subject, locally and/or systemically. Alternatively, modified therapeutic polypeptide-expressing adenovirus particles are isolated and formulated in a pharmaceutically-acceptable carrier for delivery of a therapeutically effective amount to prevent, treat or ameliorate a disease or condition of a subject. Typically, adenovirus particles are delivered at a dose ranging from 1 particle to 1014 particles per kilogram subject weight, generally between 106 or 108 particles to 1012 particles per kilogram subject weight. In some situations it is desirable to provide a nucleic acid source with an agent that targets cells, such as an antibody specific for a cell surface membrane protein or a target cell, or a ligand for a receptor on a target cell. EPO polypeptides and other modified therapeutic polypeptides also can be targeted for delivery into specific cell types. For example, adenoviral vectors encoding EPO polypeptides or other modified therapeutic polypeptides can be used for stable expression in nondividing cells, such as liver or skeletal muscle cells (see e.g., Tipathy et al. (1994) Proc Natl Acad Sci USA. 91(24): 11557-11561; Svensson et al. (1997) Hum Gene Ther 8: 1797; Setoguchi et al. (1994) Blood 84(9): 2946-2953; U.S. Pat. No. 6,613,319). In another example, viral or nonviral vectors encoding EPO polypeptides or other modified therapeutic polypeptides can be transduced into isolated cells for subsequent delivery. Additional cell types for expression and delivery of EPO and other modified therapeutic polypeptides are known in the art and include, but are not limited to, delivery to pancreatic cells, pulmonary epithelia, and mesothelial cells (Fenjves et al. (2004) Transplantation 77(1): 13-8; Davis et al. (2004) Mol. Ther. 10(3): 500-6).

[0607] The nucleic acid molecules can be introduced into artificial chromosomes and other non-viral vectors. Artificial chromosomes, such as ACES (see, Lindenbaum et al. Nucleic Acids Res. 2004 Dec. 7; 32(21):e172) can be engineered to encode and express the isoform. Briefly, mammalian artificial chromosomes (MACs) provide a means to introduce large payloads of genetic information into the cell in an autonomously replicating, non-integrating format. Unique among MACs, the mammalian satellite DNA-based Artificial Chromosome Expression (ACE) can be reproducibly generated de novo in cell lines of different species and readily purified from the host cells' chromosomes. Purified mammalian ACEs can then be re-introduced into a variety of recipient cell lines where they have been stably maintained for extended periods in the absence of selective pressure using an ACE System. Using this approach, specific loading of one or two gene targets has been achieved in LMTK(−) and CHO cells.

[0608] Another method for introducing nucleic acids encoding the modified EPO polypeptides or other modified therapeutic polypeptides is a two-step gene replacement technique in yeast, starting with a complete adenovirus genome (Ad2; Ketner et al. (1994) Proc. Natl. Acad. Sci. USA 91: 6186-6190) cloned in a Yeast Artificial Chromosome (YAC) and a plasmid containing adenovirus sequences to target a specific region in the YAC clone, an expression cassette for the gene of interest and a positive and negative selectable marker. YACs are of particular interest because they permit incorporation of larger genes. This approach can be used for construction of adenovirus-based vectors bearing nucleic acids encoding any of the described modified EPO polypeptides or other modified therapeutic polypeptides for gene transfer to mammalian cells or whole animals.

[0609] The nucleic acids can be encapsulated in a vehicle, such as a liposome, or introduced into cells, such as a bacterial cell, particularly an attenuated bacterium or introduced into a viral vector. For example, when liposomes are employed, proteins that bind to a cell surface membrane protein associated with endocytosis can be used for targeting and/or to facilitate uptake, e.g., capsid proteins or fragments thereof tropic for a particular cell type, antibodies for proteins which undergo internalization in cycling, and proteins that target intracellular localization and enhance intracellular half-life.

[0610] For ex vivo and in vivo methods, nucleic acid molecules encoding the modified EPO polypeptide or other modified therapeutic polypeptide is introduced into cells that are from a suitable donor or the subject to be treated. Cells into which a nucleic acid can be introduced for purposes of therapy include, for example, any desired, available cell type appropriate for the disease or condition to be treated, including but not limited to epithelial cells, endothelial cells, keratinocytes, fibroblasts, muscle cells, hepatocytes; blood cells such as T lymphocytes, B lymphocytes, monocytes, macrophages, neutrophils, eosinophils, megakaryocytes, granulocytes; various stem or progenitor cells, in particular hematopoietic stem or progenitor cells, e.g., such as stem cells obtained from bone marrow, umbilical cord blood, peripheral blood, fetal liver, and other sources thereof.

[0611] For ex vivo treatment, cells from a donor compatible with the subject to be treated or the subject to be treated cells are removed, the nucleic acid is introduced into these isolated cells and the modified cells are administered to the subject. Treatment includes direct administration, such as, for example, encapsulated within porous membranes, which are implanted into the patient (see, e.g., U.S. Pat. Nos. 4,892,538 and 5,283,187 each of which is herein incorporated by reference in its entirety). Techniques suitable for the transfer of nucleic acid into mammalian cells in vitro include the use of liposomes and cationic lipids (e.g., DOTMA, DOPE and DC-Chol) electroporation, microinjection, cell fusion, DEAE-dextran, and calcium phosphate precipitation methods. Methods of DNA delivery can be used to express modified EPO polypeptides and other modified therapeutic polypeptides in vivo. Such methods include liposome delivery of nucleic acids and naked DNA delivery, including local and systemic delivery such as using electroporation, ultrasound and calcium-phosphate delivery. Other techniques include microinjection, cell fusion, chromosome-mediated gene transfer, microcell-mediated gene transfer and spheroplast fusion.

[0612] In vivo expression of a modified EPO polypeptide or other modified therapeutic polypeptides can be linked to expression of additional molecules. For example, expression of a modified EPO polypeptide or other modified therapeutic polypeptide can be linked with expression of a cytotoxic product such as in an engineered virus or expressed in a cytotoxic virus. Such viruses can be targeted to a particular cell type that is a target for a therapeutic effect. The expressed modified EPO polypeptide or other modified therapeutic polypeptides can be used to enhance the cytotoxicity of the virus.

[0613] In vivo expression of a modified EPO polypeptide or other modified therapeutic polypeptides can include operatively linking a modified therapeutic polypeptide encoding nucleic acid molecule to specific regulatory sequences such as a cell-specific or tissue-specific promoter. Modified EPO polypeptides and other modified therapeutic polypeptides also can be expressed from vectors that specifically infect and/or replicate in target cell types and/or tissues. Inducible promoters can be used to selectively regulate modified polypeptide expression. Exemplary regulatable expression systems include, but are not limited to, mifepristone, doxycycline and tetracycline gene expression systems, which have been used to regulate recombinant EPO or other modified therapeutic polypeptide expression in skeletal muscle (Serguera et al. (1999) Human Gene Therapy 10(3): 375-383; Bohl et al. (1998) Blood 2(5): 1512-1517; Rizutto et al. (1999) Proc Natl Acad Sci USA. 96(11): 6417-6422; Rendahl et al. (2002) Human Gene Therapy 13(2): 335-342).

[0614] Nucleic acid molecules, as naked nucleic acids or in vectors, artificial chromosomes, liposomes and other vehicles can be administered to the subject by systemic administration, topical, local and other routes of administration. When systemic and in vivo, the nucleic acid molecule or vehicle containing the nucleic acid molecule can be targeted to a cell.

[0615] Administration also can be direct, such as by administration of a vector or cells that typically targets a cell or tissue. For example, tumor cells and proliferating cells can be targeted cells for in vivo expression of modified EPO polypeptides and other modified therapeutic polypeptides. Cells used for in vivo expression of a modified EPO polypeptide or other modified therapeutic polypeptide also include cells autologous to the patient. Such cells can be removed from a patient, nucleic acids for expression of a modified EPO polypeptide or other modified therapeutic polypeptides introduced, and then administered to a patient such as by injection or engraftment.

[0616] Polynucleotides and expression vectors provided herein can be made by any suitable method. Further provided are nucleic acid vectors comprising nucleic acid molecules as described above, including a nucleic acid molecule comprising a sequence of nucleotides that encodes the EPO polypeptide as set forth in any of SEQ ID NOS: 3-201 or a fragment thereof. Further provided are nucleic acid vectors comprising nucleic acid molecules as described above and cells containing these vectors.

### J. THERAPEUTIC USES

[0617] The modified EPO polypeptides and other modified therapeutic polypeptides and nucleic acid molecules provided herein can be used for treatment of any condition for which the unmodified EPO or unmodified therapeutic polypeptide is employed. Modified EPO polypeptides and other modified therapeutic polypeptides have therapeutic activity alone or in combination with other agents. The modified polypeptides provided herein are designed to retain therapeutic activity but exhibit modified properties, particularly increased stability. Such modified properties, for example, can improve the therapeutic effectiveness of the polypeptides and/or can provide for additional routes of administration, such as oral administration. The modified EPO polypeptides and other modified therapeutic polypeptides and encoding nucleic acid molecules provided herein can be used for treatment of any condition for which unmodified EPO or unmodified therapeutic protein is employed. This section provides exemplary uses of and administration methods. These described therapies are exemplary and do not limit the applications of modified EPO polypeptides or other modified therapeutic polypeptides.

[0618] The modified EPO polypeptides and other modified therapeutic polypeptides provided herein can be used in various therapeutic as well as diagnostic methods in which EPO or the therapeutic polypeptide is employed. Such methods include, but are not limited to, methods of treatment of physiological and medical conditions described and listed below. Modified EPO polypeptides and other modified therapeutic polypeptides provided herein can exhibit improvement of in vivo activities and therapeutic effects compared to corresponding wild-type therapeutic polypeptide, including lower dosage to achieve the same effect, a more sustained therapeutic effect and other improvements in administration and treatment.

[0619] The modified EPO polypeptides and other modified therapeutic polypeptides described herein exhibit increased protein stability and improved half-life. Thus, modified EPO polypeptides and other modified therapeutic polypeptides can be used to deliver longer-lasting, more stable therapies. Examples of therapeutic improvements using modified EPO polypeptides and other modified therapeutic polypeptides provided include, but are not limited to, lower dosages, fewer and/or less frequent administrations, decreased side effects and increased therapeutic effects.

[0620] In particular, modified EPO polypeptides, are intended for use in therapeutic methods in which EPO has been used for treatment. Such methods include, but are not limited to, methods of treatment of diseases and disorders, such as, but not limited to, anemias, such as anemias that accompany renal failure, AIDS, malignancy, and chronic inflammation. Additional exemplary anemias for treatment with modified EPO polypeptides include thalassemia, sickle cell anemia, the anemia of prematurity, anemia that accompanies cis-platinum chemotherapy, and anemia following intensive radiotherapy and/or chemotherapy plus bone marrow transplantation.

[0621] The modified EPO polypeptides provided herein are useful in modulating cell survival, proliferation and differentiation. For example, the modified EPO polypeptides and compositions containing the modified EPO polypeptides are useful in promoting erythroid precursor proliferation and can be used in vivo, ex vivo, in situ, or in vitro. For example, a composition containing a modified human EPO polypeptide where the modified EPO polypeptide is selected from any of SEQ ID NOS: 3-201, can be used to treat erythroid precursor cells derived from an individual ex vivo and then the increased proliferating cells can be administered back to the subject. EPO modified polypeptides provided herein that do not exhibit erythropoietic activity can still retain EPO activities useful for the treatment of EPO-mediated diseases, such as tissue protective activity, or can be used as antagonists of native erythropoietin (e.g. for treatment of polycythemias or conditions involving overproduction of erythropoietin) or in diagnostic assays.

[0622] Treatment of diseases and conditions with modified EPO polypeptides or other modified therapeutic polypeptides can be effected by any suitable route of administration using suitable formulations as described herein including, but not limited to, injection, pulmonary, oral and transdermal administration. If necessary, a particular dosage and duration and treatment protocol can be empirically determined or extrapolated. For example, exemplary doses of recombinant and native EPO polypeptides or other therapeutic polypeptides can be used as a starting point to determine appropriate dosages. Modified EPO polypeptides and other modified therapeutic polypeptides that are more stable and have an increased half-life in vivo, can be effective at reduced dosage amounts and or frequencies. For example, because of the improvement in properties such as serum stability, dosages can be lower than comparable amounts of unmodified EPO or other unmodified therapeutic polypeptide. Dosages for unmodified EPO polypeptides or other unmodified therapeutic polypeptides can be used as guidance for determining dosages for the corresponding modified polypeptides. Factors such as the level of activity and half-life of the modified polypeptide in comparison to the unmodified polypeptide can be used in making such determinations. Particular dosages and regimens can be empirically determined.

[0623] For any of the modified EPO polypeptides and other modified therapeutic polypeptides provided herein, a particular dosage that is therapeutically effective can be estimated initially using a variety of techniques well known in the art. For example, in a cell culture assay, a dose can be formulated in animal models to achieve a circulating concentration range that includes the 1050 as determined in cell culture. Dosage range appropriate for human subjects can be determined, for example using data obtained from cell culture assay and other animal studies.

[0624] Dosage levels and regimens can be determined based upon known dosages and regimens, and, if necessary can be extrapolated based upon the changes in properties of the modified polypeptides and/or can be determined empirically based on a variety of factors. Such factors include body weight of the individual, general health, age, the activity of the specific compound employed, sex, diet, time of administration, rate of excretion, drug combination, the severity and course of the disease, and the patient's disposition to the disease and the judgment of the treating physician. Other factors for determination of dosage can include the desired level of biological activity or result, such as, but not limited to, desired hematocrit levels. The active ingredient, the polypeptide, typically is combined with a pharmaceutically effective carrier. The amount of active ingredient that can be combined with the carrier materials to produce a single dosage form or multi-dosage form can vary depending upon the host treated and the particular mode of administration.

[0625] Upon improvement of a patient's condition, a maintenance dose of a compound or compositions can be administered, if necessary; and the dosage, the dosage form, or frequency of administration, or a combination thereof can be modified. In some cases, a subject can require intermittent treatment on a long-term basis upon any recurrence of disease symptoms or based upon scheduled dosages. In other cases, additional administrations can be required in response to acute events such as hemorrhage, trauma, or surgical procedures.

[0626] Selection of the preferred effective and non-toxic dose for the administration methods provided can be determined by a skilled artisan based upon factors known to one of ordinary skill in the art. Examples of these factors include the particular form of the modified EPO polypeptide or other modified therapeutic polypeptide; the pharmacokinetic parameters of the modified polypeptide, such as bioavailability, metabolism, half-life, etc. (provided to the skilled artisan); the condition or disease to be treated; the benefit to be achieved in a normal individual; the body mass of the patient; the method of administration; the frequency of administration, i.e., chronic, acute, intermittent; concomitant medications; and other factors well known to affect the efficacy of administered pharmaceutical agents. Thus the precise dosage should be decided according to the judgment of the practitioner and the circumstances of the particular patient.

[0627] Exemplary dosages for administration of an EPO polypeptide are known in the art and can be used as a basis for determination of dosages for the modified EPO polypeptides provided herein. For example, wherein a recombinant human EPO polypeptide has erythropoietic activity for the treatment of anemia, the recombinant human EPO is typically administered in an initial dose of between 50-150 units/kg body weight three times per week for about six to eight weeks either by an intravenous or subcutaneous injection in order to restore the suggested hematocrit range within the patient. After the patient achieves a desired hematocrit level, such as an amount falling within from about 30 percent to about 36 percent, that level can be sustained by maintenance doses of EPO, an amount sufficient to and administered with a frequency suitable for maintaining the normal hematocrit levels achieved by the initial doses of EPO, in the absence of iron deficiency and concurrent illnesses. While dosage requirements can vary according to the patient's individual needs, typically maintenance dosages can be administered about three times a week (less if larger doses are provided). The effective dose should be sufficient to achieve serum levels of the compound greater than about 10,000, 15,000, or 20,000 mU/ml of serum after compound administration. Such serum levels can be achieved at about 1, 2, 3, 4, 5, 6, 7, 8, 9, or 10 hours post-administration. Such dosages can be repeated as necessary. For example, administration can be repeated daily, as long as clinically necessary, or after an appropriate interval, e.g., every 1 to 12 weeks, but preferably, every 1 to 3 weeks.

[0628] The modified EPO polypeptides provided herein have an increased resistance to proteases which can result in increased serum half-life. Hence, their effectiveness in the body also is increased. As a result, modified EPO polypeptides provided herein can be administered with less frequent or smaller doses than compared to the frequency and amount of present recombinant EPO compositions.

[0629] The following are some exemplary conditions for which EPO has been used as a treatment agent alone or in combination with other agents.

[0630] 1. Anemias

[0631] Among purified EPO therapeutics available for the treatment of EPO-mediated diseases, such as anemia, are: Epoietin α isoforms including products such as Epogen®, Procrit®, Eprex®, Erypo®, Epopen®, Epoxitin®, Globuren®, Epoade®, and Espo®; Epoietin β isoforms including products such as Recormon®, Neorecormon®, Epogin®, Epoch®, Eritrogen®, Erantin®, and Marogen®; Epoietin ω isoforms including products such as Epomax® and Hemax®; Epoietin δ isoforms including products such as Dynepo®; Darbepoietin α isoforms including products such as Aranesp®; R-744 Continuous erythropoietin receptor activator (CERA); and Synthetic erythropoiesis protein (SEP). All such products can be modified as described herein and/or replaced with modified EPO polypeptides provided herein. The modified EPO polypeptides provided herein and the nucleic acids encoding the modified EPO polypeptides provided herein can be used in therapies for anemia, including treatment of conditions associated with deficiencies of red blood cells. The modified EPO polypeptides provided herein can be used, for example, to promote erythropoiesis and regeneration of red blood cells. Exemplary anemias for treatment with modified EPO polypeptides provided herein include anemias caused by renal failure, AIDS, malignancy, and chronic inflammation. Additional exemplary anemias for treatment with modified EPO polypeptides provided herein include hemoglobinopathies, such as thalassemia and sickle cell disorders, anemia of prematurity, iron storage disorders, anemia caused by administration of chemotherapeutic agents, such as cis-platinum or radiation, aplitic anemias, anemia caused by administration of therapeutic agents, such as ribavirin, for the treatment of hepatitis C, anemias associated with malignant disease (e.g., any type of solid cancer, metastatic breast cancer, or hematological cancer including leukemia, lymphoma, or multiple myeloma), excessive blood cell destruction (hemolysis, hemolytic anemias, eryptosis), excessive blood loss (acutely such as a hemorrhage or chronically through low-volume loss), aging, chronic kidney disease (CDK), hepatitis, renal failure, zidovudine therapy (e.g., AZT treatment) in AIDS patients, paroxysmal nocturnal hemoglobinuria (PNH), cystic fibrosis, diabetic nephropathy, sepsis, cerebral hypoxia/ischemia, rheumatic disease, myelodysplastic syndrome, congestive heart failure (CHF), Gaucher's disease, Castleman's disease, and anemia following intensive radiotherapy and/or chemotherapy plus bone marrow transplantation (see e.g., Little et al. (2006) Haematologica 91(8): 1076-83; Eisenstaedt et al. (2006) Blood Rev. 20(4): 213-26; Rodgers and Lessin (1989) Blood 73(8): 2228-9; Boogaerts et al. (2005) Oncology. 69 Suppl 2: 22-30; Regnier et al. (1989) ANNA J. (7): 512-3, Olsson et al. (2002) Acta Oncol. 41(6): 517-24; Ritz and Haxsen (2005) Eur J Clin Invest. 35 Suppl 3: 66-74, Nurko (2006) Cleveland Clin. J. Med. 73(3): 289-297; Koltwasser et al. (2001) J Rheumatol. 28(11): 2430-6; Kuehl and Noormohamed (1995) Ann Pharmacother. 29(7-8): 778-9; Singer et al. (2005) Ann N Y Acad. Sci. 1054: 250-6). Modified EPO polypeptides provided herein also can be used in treatment of anemias associated with angina, pulmonary disease, hypotension, congestive heart failure, or cerebrovascular disease causing transient ischemic attacks. Modified EPO polypeptides provided herein also can be used in treatment of subjects undergoing surgery, either before, during, or after surgery, such as non-cardiac or non-vascular surgery, where there is a risk of excessive blood loss. Modified EPO polypeptides provided herein also can be used for the treatment of nutritional deficiency anemias, such iron deficiency anemia or folate deficiency anemia, in combination with iron or vitamin supplement therapies.

[0632] In addition to the treatment of anemia, modified EPO polypeptides provided herein and the nucleic acids encoding the modified EPO polypeptides provided herein can be used in therapies for the treatment of iron overload disorder. A subject having an iron overload disorder is administered modified EPO polypeptides to increase red blood cell production and the subject is subsequently phlebotomized to remove the excess red blood cells produced (see e.g., U.S. Pat. No. 5,013,718).

[0633] Modified EPO polypeptides provided herein and the nucleic acids encoding the modified EPO polypeptides provided herein can be used in therapies for abnormal hemostasis. For example, modified EPO polypeptide can be used to treat, control or prevent the bleeding in patients with congenital or acquired disorders of coagulation, platelets, or blood vessels, patients on therapeutic or overdose of anticoagulants or antiplatelet drugs (U.S. Pat. No. 6,274,158).

[0634] A method is provided for increasing erythrocytes in a subject by administering to the subject an effective amount of a composition that contains a modified EPO polypeptide containing an amino acid sequence selected from SEQ ID NOS: 3-201 and a pharmaceutically acceptable medium. The number of erythrocytes in an individual can be measured, for example, using a hematocrit. Further, a method is provided for increasing erythrocytes in a subject by administering to the subject an effective amount of a composition that contains a modified EPO polypeptide containing an amino acid sequence selected from SEQ ID NOS: 3-201 and a pharmaceutically acceptable medium, and where the subject is anemic. For example, a modified EPO polypeptide or composition of a modified EPO polypeptide can be administered in an amount effective to increase the hematocrit level of an anemic subject. Anemia can be caused by several factors including diet and genetic factors as well as pathologies. For example, anemia can be caused by chronic renal failure or can be induced as a side-effect of chemotherapy treatment for an individual who has cancer.

[0635] The modified EPO polypeptides herein provide increased protein stability and increased protein half-life. Of particular interest are EPO polypeptides that are resistant to proteases. Thus, modified EPO polypeptides can be used to deliver longer lasting, more stable therapies for anemia. Such polypeptides include, for example, a modified EPO polypeptide selected from any of SEQ ID NOS: 3-201. Examples of therapeutic improvements using modified EPO polypeptides include, but are not limited to, lower dosages, fewer and/or less frequent administrations, decreased side effects, and increased therapeutic effects. Modified EPO polypeptides can be tested for therapeutic effectiveness, for example, by using animal models. For example anemic mice, or any other known disease model for anemia, can be treated with modified EPO polypeptides. Progression of disease symptoms and phenotypes is monitored to assess the effects of the modified EPO polypeptides. Modified EPO polypeptides also can be administered to animal models as well as subjects such as in clinical trials to assess in vivo effectiveness in comparison to placebo controls and/or controls using unmodified EPO.

[0636] The modified EPO polypeptide can be used to deliver longer lasting, more stable anemia therapies. Thus, the modified EPO polypeptides provided herein can be administered at lower dosages and/or less frequently than unmodified or native EPO polypeptides or other recombinant forms of EPO, such as the Epoietin α, β, ω, δ, and Darbepoietin α isoform listed above, while retaining one or more therapeutic activities and/or having one or more fewer/decreased side effects.

[0637] 2. Tissue Protective Therapies

[0638] The modified EPO polypeptides provided herein and the nucleic acids encoding the modified EPO polypeptides provided herein can be used in therapies for protection against an injury or restoration of function following the injury to responsive mammalian cells, tissues, or organs. Exemplary responsive mammalian cells include neuronal, brain, spinal cord, retinal, muscle, heart, lung, liver, kidney, small intestine, adrenal cortex, adrenal medulla, capillary, endothelial, testes, ovary, endometrial, or stem cells. Additional exemplary responsive mammalian cells include photoreceptor, ganglion, bipolar, horizontal, amacrine, Müller, myocardium, pace maker, sinoatrial node, sinus node, atrioventricular node, bundle of His, hepatocyte, stellate, Kupffer, mesangial, goblet, intestinal gland, enteral, endocrine, glomerulosa, fasciculate, reticularis, chromaffin, pericyte, Leydig, Sestoli, sperm, Graafian follicles, primordial follicles, endometrial stroma, and endometrial cells.

[0639] The modified EPO polypeptides provided herein and the nucleic acids encoding the modified EPO polypeptides provided herein can be used in the preparation of a pharmaceutical composition for treatment of conditions associated with diseases of the central nervous system or peripheral nervous system which have primarily neurological or psychiatric symptoms, ophthalmic diseases, cardiovascular diseases, cardiopulmonary diseases, respiratory diseases, kidney, urinary diseases, reproductive diseases, bone diseases, skin diseases, gastrointestinal diseases, and endocrine and metabolic abnormalities. The modified EPO polypeptides provided herein and the nucleic acids encoding the modified EPO polypeptides provided herein can be used to provide for the local or systemic protection of cells, tissues and organs within a subject or restoration or regeneration of dysfunction resulting from such conditions.

[0640] In particular, such conditions and diseases include hypoxic conditions, which adversely affect excitable tissues, such as excitable tissues in the central nervous system tissue, peripheral nervous system tissue, or cardiac tissue or retinal tissue such as, for example, brain, heart, or retina/eye. Any condition which reduces the availability of oxygen to neuronal tissue, resulting in stress, damage, and finally, neuronal cell death, can be treated by administration of the modified EPO polypeptides provided herein and the nucleic acids encoding the modified EPO polypeptides provided herein. Generally referred to as hypoxia and/or ischemia, these conditions arise from or include, but are not limited to stroke, vascular occlusion, prenatal or postnatal oxygen deprivation, suffocation, choking, asthma, near drowning, carbon monoxide poisoning, smoke inhalation, trauma, including surgery and radiotherapy, asphyxia, epilepsy, hypoglycemia, chronic obstructive pulmonary disease, emphysema, adult respiratory distress syndrome, hypotensive shock, septic shock, anaphylactic shock, insulin shock, sickle cell crisis, cardiac arrest, dysrhythmia, nitrogen narcosis, and neurological deficits caused by heart-lung bypass procedures.

[0641] Hence, modified EPO polypeptides provided herein and the nucleic acids encoding the modified EPO polypeptides provided herein are useful generally for the therapeutic or prophylactic treatment of human diseases of the central nervous system or peripheral nervous system which have primarily neurological or psychiatric symptoms, ophthalmic diseases, cardiovascular diseases, cardiopulmonary diseases, respiratory diseases, kidney, urinary and reproductive diseases, bone diseases, skin diseases, gastrointestinal diseases and endocrine and metabolic abnormalities. In particular, such conditions and diseases include hypoxic conditions, which adversely affect excitable tissues, such as excitable tissues in the central nervous system tissue, peripheral nervous system tissue, or cardiac tissue or retinal tissue such as, for example, brain, heart, or retina/eye. Therefore, modified EPO polypeptides provided herein and the nucleic acids encoding the modified EPO polypeptides provided herein can be used to treat or prevent damage to excitable tissue resulting from hypoxic conditions in a variety of conditions and circumstances. Administration of modified EPO polypeptides provided herein and the nucleic acids encoding the modified EPO polypeptides provided herein can be used for protection against an injury such as a seizure disorder, multiple sclerosis, stroke, hypotension, cardiac arrest, ischemia, myocardial infarction, inflammation, age-related loss of cognitive function, cognitive decline in subjects with schizophrenia, radiation damage, cerebral palsy, neurodegenerative disease, Alzheimer's disease, Parkinson's disease, Leigh disease, AIDS dementia, memory loss, amyotrophic lateral sclerosis, alcoholism, mood disorder, anxiety disorder, attention deficit disorder, schizophrenia, autism, Creutzfeld-Jakob disease, brain or spinal cord trauma or ischemia, heart-lung bypass, chronic head failure, macular degeneration, toxin induced neuropathy, diabetic neuropathy, diabetic retinopathy, glaucoma, retinal ischemia, or retinal trauma (see e.g. Grasso et al. (2006) J Neurosurg Spine 4(4):310-80; Boogaert et al. (2005) Oncology. 69 Suppl 2:22-30; Krebs et al. (2006) Expert Opin Pharmacother. 7(7): 837-48).

[0642] Modified EPO polypeptides provided herein and the nucleic acids encoding the modified EPO polypeptides provided herein can be used in therapies for the treatment of a neurological condition in a subject, by administering to the subject an effective amount of a composition containing a modified EPO polypeptide provided herein having an amino acid sequence selected from SEQ ID NOS: 3-201 and a pharmaceutically acceptable medium. For example a pharmaceutical composition containing a modified EPO polypeptide provided herein can be administered prophylactically in individuals who are at risk for neurological conditions or can be used after an event such as a stroke or other neurological damage. As described above, a neurological condition can be a pathological condition affecting neuronal or glial cells in the nervous system. Pathological conditions affecting neuronal or glial cells include ischemia, apoptosis, necrosis, oxidative or free radical damage, and excitotoxicity. For example, neurological conditions include, but are not limited to, cerebral and spinal ischemia, acute brain injury, spinal cord injury, retinal disease, and neurodegenerative diseases such as Alzheimer's disease, Parkinson's disease, Huntington's disease, and ALS.

[0643] The modified EPO polypeptides herein provide increased protein stability and increased protein half-life. Of particular interest are EPO polypeptides that are resistant to proteases. Thus, modified EPO polypeptides can be used to deliver longer lasting, more stable therapies for protection against an injury or restoration of function following the injury to responsive mammalian cells, tissues, or organs. Such polypeptides include, for example, a modified EPO polypeptide selected from any of SEQ ID NOS: 3-201. Examples of therapeutic improvements using modified EPO polypeptides include, but are not limited to, lower dosages, fewer and/or less frequent administrations, decreased side effects, and increased therapeutic effects. Modified EPO polypeptides can be tested for therapeutic effectiveness, for example, by using animal models that can be treated with modified EPO polypeptides. Progression of disease symptoms and phenotypes is monitored to assess the effects of the modified EPO polypeptides. Modified EPO polypeptides also can be administered to animal models as well as subjects such as in clinical trials to assess in vivo effectiveness in comparison to placebo controls and/or controls using unmodified EPO.

[0644] The modified EPO polypeptide can be used to deliver longer lasting, more stable therapies for protection against an injury or restoration of function following the injury to responsive mammalian cells, tissues, or organs. Thus, the modified EPO polypeptides provided herein can be administered at lower dosages and/or less frequently than unmodified or native EPO polypeptides or other recombinant forms of EPO, such as the Epoietin α, β, ω, δ, and Darbepoietin α isoform listed above, while retaining one or more therapeutic activities and/or having one or more fewer/decreased side effects.

### K. DIAGNOSTIC USES

[0645] Modified EPO polypeptides provided herein also can be used for diagnostic purposes. For example, modified EPO polypeptides can be used in assay procedures for detecting the presence and determining the quantity, if desired, of an erythropoietin receptor or for comparing activities of factors that induce erythropoiesis. A modified EPO polypeptide with enhanced activity would be useful to increase the sensitivity and decrease the incubation times of assays that involve binding to a receptor, for example. Modified EPO polypeptides provided herein also can be used in in vitro binding assays to determine the effect of new drugs on the binding of erythropoietin protein to its receptor.

[0646] Modified EPO polypeptides provided herein also provide useful research reagents to further elucidate the role of erythropoietin in erythropoiesis, as well as the structure/function relationship of erythropoietin and an erythropoietin receptor. For example, modified EPO polypeptides can be useful for evaluating a substance for ability to regulate growth and differentiation of red blood cell progenitor cells. One exemplary assay to indicate the ability of a substance to regulate growth and differentiation of red blood cell progenitor cells is to compare of binding of the substance to an erythropoietin receptor with the binding of a modified EPO polypeptide to an erythropoietin receptor. If the binding to an erythropoietin receptor of the test substance (i.e., the substance to be evaluated) is comparable to the binding to the erythropoietin receptor of a modified EPO polypeptide, then the binding of the test substance is an indication that the ability of the substance to regulate growth and differentiation of red blood cell progenitor cells is of approximately the same ability as the modified secretable mutant erythropoietin. Binding to an erythropoietin receptor can be determined by using any of a number of methods familiar to those of skill in the art. For example, methods such as those described in Yonekura et al. (1991) Proc. Natl. Acad. Sci. USA 88: 1-5; Chern et al. (1990) Blood 76(11): 2204-2209; and Krystal (1983) Exp. Hematol. 11: 649-660, the teachings of which are incorporated herein by reference, can be used.

### L. COMBINATION THERAPIES

[0647] Any of the modified EPO polypeptides, and nucleic acid molecules encoding modified EPO polypeptides described herein can be administered in combination with, prior to, intermittently with, or subsequent to, other therapeutic agents or procedures including, but not limited to, other biologics, small molecule compounds and surgery. For any disease or condition, including all those exemplified above, for which EPO is indicated or has been used and for which other agents and treatments are available, EPO can be used in combination therewith. Hence, the modified EPO polypeptides provided herein similarly can be used. Depending on the disease or condition to be treated, exemplary combinations include, but are not limited to, combination with colony stimulating factors, hemoglobins, chemotherapeutic agents (e.g., cytokines, growth factors, hormones, photosensitizing agents, radionuclides, toxins, anti-metabolites, signaling modulators, anti-cancer antibiotics, anti-cancer antibodies, anti-cancer oligopeptides, angiogenesis inhibitors, radiation therapy, chemotherapeutic compounds, or a combination thereof), or iron (e.g., Tabron, Ferosol, Chromogen, Niferex, compositions of ferrous sulfate or ferrous fumarate, iron dextran).

[0648] Modified EPO polypeptides provided herein that are used to treat patients with a hemoglobinopathy, such as sickle cell anemia or hemoglobin E (Hb E)-β⁰-thalassemia, can be co-administered with recombinant hemoglobin or agents that elevate endogenous production of fetal hemoglobin, such as, but not limited to, hydroxyurea and sodium phenylbutyrate or agents that block red blood cell dehydration, such as clotrimazole.

[0649] Modified EPO polypeptides provided herein can be co-administered or sequentially administered with one or more additional colony stimulating factors (CSF) including, cytokines, lymphokines, interleukins, hematopoietic growth factors which include but are not limited to GM-CSF (e.g., sargramostim, LEUKINE®, PROKINE®), G-CSF (e.g., filgrastim, NEUPOGEN®), c-mpl ligand (also known as thrombopoietin (TPO) or MGDF), M-CSF (also known as CSF-1), IL-1, IL-4, IL-2, IL-3, IL-5, IL 6, IL-7, IL-8, IL-9, IL-10, IL-11, IL-12, IL-13, IL-15, LIF, human growth hormone, B-cell growth factor, B-cell differentiation factor, eosinophil differentiation factor, and stem cell factor (SCF, c-kit ligand, steel factor), PIXY321 (a GMCSF/IL-3 fusion protein), or interferons, such as interferon-gamma. Modified EPO polypeptides provided herein can be used in combination with other erythropoietin forms (epoetin alfa, EPOGEN®, PROCRIT®). Combinations of such factors with a modified EPO polypeptide provided herein can have the usual activity of each of the peptides or can have a biological or physiological activity that is greater than the additive activities of the factor and the modified EPO polypeptide alone. The combination also can provide an enhanced effect on the activity or an activity different from that expected by the presence of the EPO or the additional factor. The co-administration also can have an improved activity profile which can include reduction of undesirable biological activities associated with native human EPO. In addition to the list above, modified forms of the factors also can be used in such combinations (see e.g., IL-3 variants in WO 94/12639, WO 94/12638, WO 95/21197, and WO 95/21254; G-CSF receptor agonists in WO 97/12977; c-mpl receptor agonists in WO 97/12978; IL-3 receptor agonists in WO 97/12979; multi-functional receptor agonists in WO 97/12985). As used herein “IL-3 variants” refer to IL-3 variants taught in WO 94/12639 and WO 94/12638.

[0650] Modified EPO polypeptides provided herein also can be used in combination therapies for disease and disorders for which administration of a therapeutic compound or agent causes an anemia. For example, treatment of subjects with hepatitis C(HCV)-infection often involves administration of the combination of ribavirin (RBV) and interferon-alpha (IFN-α). Such therapy can lead to anemia (in up to 10% of individuals prescribed these medications) severe enough to warrant dose reductions or cessation of therapy, and a decrease in hemoglobin of >3 grams/dl (occurs in 54% of people treated with RBV and IFN-α). Combination treatment of ribavirin (RBV) and interferon-alpha (IFN-α) can alleviate the problems of therapy-induced anemia (U.S. Pat. No. 6,833,351). Accordingly, modified EPO polypeptides provided herein can be used in combination therapies to treat anemia caused by ribavirin (RBV) and interferon-alpha (IFN-α) administration.

### M. ARTICLES OF MANUFACTURE AND KITS

[0651] Pharmaceutical compounds of modified EPO polypeptides and other modified therapeutic polypeptides or nucleic acids encoding modified polypeptides thereof, or a derivative or a biologically active portion thereof can be packaged as articles of manufacture containing packaging material, a pharmaceutical composition which is effective for treating an EPO-mediated disease or disorder or therapeutic polypeptide-mediated disease or disorder, and a label that indicates that modified EPO polypeptide or nucleic acid molecule is to be used for treating a EPO-mediated disease or disorder or therapeutic polypeptide-mediated disease or disorder.

[0652] The articles of manufacture provided herein contain packaging materials. Packaging materials for use in packaging pharmaceutical products are well known to those of skill in the art. See, for example, U.S. Pat. Nos. 5,323,907, 5,052,558 and 5,033,352, each of which is incorporated herein in its entirety. Examples of pharmaceutical packaging materials include, but are not limited to, blister packs, bottles, tubes, inhalers, pumps, bags, vials, containers, syringes, bottles, and any packaging material suitable for a selected formulation and intended mode of administration and treatment. A wide array of formulations of the compounds and compositions provided herein are contemplated as are a variety of treatments for any EPO-mediated disease or disorder or therapeutic polypeptide-mediated disease or disorder.

[0653] Modified EPO polypeptides and other modified therapeutic polypeptides and nucleic acid molecules encoding the modified polypeptides thereof also can be provided as kits. Kits can include a pharmaceutical composition described herein and an item for administration. For example a modified EPO or other modified therapeutic polypeptide can be supplied with a device for administration, such as a syringe, an inhaler, a dosage cup, a dropper, or an applicator. The kit can, optionally, include instructions for application including dosages, dosing regimens and instructions for modes of administration. Kits also can include a pharmaceutical composition described herein and an item for diagnosis. For example, such kits can include an item for measuring the concentration, amount or activity of EPO or other therapeutic polypeptide or a EPO regulated system of a subject.

### N. ANTIBODIES TO MODIFIED EPO POLYPEPTIDES AND OTHER MODIFIED THERAPEUTIC POLYPEPTIDES

[0654] Antibodies can be generated that recognize the modified EPO polypeptides or other modified therapeutic polypeptides provided herein. Antibodies include, for example, monoclonal and polyclonal antibodies, single chain antibodies, chimeric antibodies, bifunctional or bispecific antibodies, humanized antibodies, human antibodies, and complementary determining region (CDR)-grafted antibodies, including compounds which include CDR or antigen-binding sequences, which specifically bind to a modified EPO polypeptide or other modified therapeutic polypeptide provided herein. Antibody fragments, including Fab, Fab′, F(ab′).sub.2, and Fv, also are provided. Screening assays to determine binding specificity or exclusivity of an antibody provided herein are well known in the art (see e.g., Harlow et al. (Eds), Antibodies A Laboratory Manual; Cold Spring Harbor Laboratory; Cold Spring Harbor, N.Y. (1988)).

[0655] Antibodies can be produced using any method well known in the art, using a modified EPO polypeptide and other modified therapeutic polypeptide provided, or fragment thereof that contains the modification or modifications. Immunogenic polypeptides can be isolated from natural sources, from recombinant host cells, or can be chemically synthesized. Modified EPO polypeptides and other modified therapeutic polypeptides also can be conjugated to a hapten such as keyhole limpet hemocyanin (KLH) in order to increase immunogenicity. Methods for synthesizing such peptides are known in the art, for example, as in Merrifield (1963) J. Amer. Chem. Soc. 85: 2149-2154; Krstenansky, et al. (1987) FEBS Lett. 211:10. Antibodies to a modified EPO polypeptide or other modified therapeutic polypeptide provided herein also can be prepared through immunization using a nucleic acid the encodes a modified EPO polypeptide (see e.g., Fan et al. (1999) Nat. Biotech. 17:870-872). DNA encoding a modified EPO polypeptide or other modified therapeutic polypeptide provide can be used to generate antibodies against the encoded polypeptide following topical administration of naked plasmid DNA or following injection, for example, intramuscular injection, of the DNA.

[0656] Non-human antibodies can be humanized by any methods known in the art. In one method, the non-human CDRs are inserted into a human antibody or consensus antibody framework sequence. Further changes can then be introduced into the antibody framework to modulate affinity or immunogenicity. Antibodies further include plastic antibodies or molecularly imprinted polymers (MIPs) (Haupt and Mosbauch (1998) TIBTech 16:468-475). Antibodies of this type can be useful, for example, in immunoaffinity separation, chromatography, solid phase extraction, immunoassays, for use as immunosensors, and for screening chemical or biological libraries. Advantages of antibodies of this type are that no animal immunization is required, the antibodies are relatively inexpensive to produce, they are resistant to organic solvents, and they are reusable over long period of time.

[0657] Antibodies that bind to modified EPO polypeptides or other modified therapeutic polypeptides provided herein can be used in diagnostic and therapeutic methods. For example, antibodies can be used in diagnostic assays to detect the presence, absence or amount of a modified therapeutic polypeptide in vivo, in vitro, or in situ, e.g., detecting its expression in specific cells, tissues, or serum. Various diagnostic assay techniques known in the art can be used, such as competitive binding assays, direct or indirect sandwich assays, and immunoprecipitation assays conducted in either heterogeneous or homogeneous phases (Zola (1987) Monoclonal Antibodies: A Manual of Techniques, CRC Press, Inc. 147-158).

[0658] Antibodies provided herein that recognize a modified EPO polypeptide can be specific to a modified EPO polypeptide. An antibody that is specific to a modified EPO polypeptide, as described herein, can bind to a modified EPO polypeptide with a higher affinity than a wild-type EPO polypeptide, an EPO polypeptide from another species (i.e. species variant), or other modified EPO polypeptide. An antibody that specifically recognizes a modified EPO polypeptide can be used in a diagnostic assay to distinguish a particular modified EPO polypeptide from a wild-type EPO polypeptide, an EPO polypeptide from another species (i.e. species variant), or other modified EPO polypeptide. In addition, an antibody can be labeled with a therapeutic moiety such as chemotherapeutic agent and used, for example, to reduce the number of cells that can internalize these polypeptides. Further, an antibody that recognizes a modified EPO polypeptide provided herein can act in a competitive or dominant negative fashion to interfere with or reduce an erythropoietin activity.

[0659] The antibodies used in the diagnostic assays can be labeled with a detectable moiety to facilitate detection. The detectable moiety can produce, either directly or indirectly, a detectable signal. For example, the detectable moiety can be a radioisotope, such as ³H, ¹⁴C, ³²P, ³⁵S, or ¹²⁵I, a fluorescent, or chemiluminescent compound, such as fluorescein isothiocyanate, rhodamine, or luciferin, or an enzyme, such as alkaline phosphatase, beta-galactosidase or horseradish peroxidase. Any method known in the art for conjugating the antibody to the detectable moiety can be employed, including those methods described by Hunter et al. (1962) Nature, 144: 945; David et al. (1974) Biochemistry, 13:1014; Pain et al. (1981) J. Immunol. Meth., 40: 219; and Nygren (1982) Histochem. and Cytochem. 30: 407. A moiety, such as a fluorescent molecule, can be linked to a modified therapeutic polypeptide, including an antibody that recognizes a modified EPO polypeptide, at any location within the polypeptide. Chemistries used for the linkage of various moieties to polypeptides are well known in the art. A moiety such as detection moiety can be linked to a modified therapeutic polypeptide, including an antibody, using, for example, carbodiimide conjugation (Bauminger and Wilchek (1980) Meth. Enzymol. 70:151-159). Carbodiimides comprise a group of compounds that have the general formula R—N═C═N—R′, where R and R′ can be aliphatic or aromatic, and are used for synthesis of polypeptide bonds. The preparative procedure is simple, relatively fast, and is carried out under mild conditions. Carbodiimide compounds attack carboxylic groups to change them into reactive sites for free amino groups. Carbodiimide conjugation has been used to conjugate a variety of compounds to carriers for the production of antibodies. The water soluble carbodiimide, 1-ethyl-3-(3-dimethylaminopropyl) carbodiimide (EDC) is useful for conjugating a moiety to a polypeptide, including an antibody provided herein.

[0660] Antibodies that bind to modified EPO polypeptides or other modified therapeutic polypeptides provided herein also are useful for the affinity purification of modified therapeutic polypeptides from recombinant cell culture or natural sources. In this process, the antibodies against the modified therapeutic polypeptide are immobilized on a suitable support, such a Sephadex resin or filter paper, using methods well known in the art. The immobilized antibody then is contacted with a sample containing the modified therapeutic polypeptide to be purified, and thereafter the support is washed with a suitable solvent that will remove substantially all the material in the sample except the modified therapeutic polypeptide, which is bound to the immobilized antibody. Finally, the support is washed with another suitable solvent that will release the modified therapeutic polypeptide from the antibody.

[0661] Antibodies specifically binding a modified EPO polypeptide or other modified therapeutic polypeptides identified herein can be administered for the treatment of various disorders in the form of pharmaceutical compositions. The formulation herein also can contain more than one active compound as necessary for the particular indication being treated, preferably those with complementary activities that do not adversely affect each other. Alternatively, or in addition, the composition can comprise an agent that enhances its function, such as, for example, a cytotoxic agent, cytokine, chemotherapeutic agent, or growth-inhibitory agent. Such molecules are suitably present in combination in amounts that are effective for the purpose intended.

### O. EXAMPLES

[0662] The following examples are included for illustrative purposes only and are not intended to limit the scope of the embodiments provided herein.

### Example 1

### Cloning and Generation EPO Mutants

[0663] 1. Cloning of cDNA Encoding EPO and Insertion into a Mammalian Expression Vector

[0664] The nucleotide sequence comprising the coding sequence of human erythropoietin (SEQ ID NO: 229) was amplified by polymerase chain reaction (PCR), using standard techniques known in the art, from the GeneStorm® Human Clone ID RG001720 (from ResGen ORF Expression Positive Collection—Catalog #H-K1000, Invitrogen; sequence is carried in mammalian expression plasmid pcDNA3.1/GS, Invitrogen, SEQ ID NO: 230), using the following primers:

EPO BamHI forward primer:
(SEQ ID NO: 231)
5′-GGGAATTCCATATGGGGGTGCACGAATGTCCTGCCTGG-3′
and
EPO NdeI reverse primer:
(SEQ ID NO: 232)
5′-CGGGATCCTCATCTGTCCCCTGTCCTGCAGGCCTCCC-3′.

The amplified sequence human erythropoietin cDNA sequence was cloned into pTOPO-TA vector (Invitrogen) to generate the plasmid pTOPO-TA-hEPO. The sequence of the EPO cDNA was checked by automatic DNA sequencing. The pTOPO-TA-hEPO plasmid was then digested with both NotI and SpeI restriction enzymes and hEPO fragment was subcloned into pNAUT digested with NotI and XbaI, to generate the construct pNAUT-hEPO (SEQ ID NO: 233). The sequence of the EPO-cDNA was confirmed by sequencing using the following primers:

pNAUT forward primer:
(SEQ ID NO: 234)
5′-TATAAGCAGAGCTCTCTG-3′
pNAUT reverse primer:
(SEQ ID NO: 235)
5′-CACAGTCGAGGCTGATCAG-3′.

The encoded mature form of the EPO polypeptide has a sequence of amino acids as set forth in SEQ ID NO: 2.

[0665] 2. Generation of EPO Mutants

[0666] A collection of pre-designed, targeted mutants was generated such that each individual mutant was created and processed individually, and physically separated from each other and in addressable arrays. 2D-scanning technology, described herein and also described in published U.S. Application Nos. US-2004-0132977-A1 and US 2005-0202438 A1 was used to design and obtain hEPO mutants with improved resistance to proteolysis. Is-HITs were identified based upon (1) the protein property to be evolved (e.g., resistance to proteolysis or stability); (2) the amino acid sequence; and (3) the properties of individual amino acids.

### LEADS Created for Higher Resistance to Proteolysis of EPO

[0667] Variants were designed using 2D-scanning to identify positions conferring resistance to proteolysis. Positions selected (is-HITs) on hEPO (SEQ ID NO: 2) were (numbering corresponds to amino acid positions in the mature hEPO polypeptide set forth in SEQ ID NO: 2, i.e., without the signal peptide): P2, P3, R4, L5, D8, R10, L12, E13, R14, Y15, L16, L17, E18, K20, E21, E23, E31, L35, E37, P42, D43, K45, F48, Y49, W51, K52, R53, M54, E55, E62, W64, L67, L69, L70, E72, L75, R76, L80, L81, P87, W88, E89, P90, L91, L93, D96, K97, L102, R103, L105, L108, L109, R110, L112, K116, E117, P121, P122, D123, P129, L130, R131, D136, F138, R139, K140, L141, F142, R143, Y145, F148, L149, R150, K152, L153, K154, L155, Y156, E159, R162, D165, R166.

[0668] The native amino acid at each of the is-HIT positions listed above was replaced by residues as listed in Table 19.

TABLE 19

| Amino acid at | Replacing |
|---|---|
| is-HIT | amino acids |
| R | H, Q |
| E | Q, H, N |
| K | Q, T, N |
| D | Q, H, N |
| M | I, V |
| P | A, S |
| Y | I, H |
| F | I, V |
| W | H, S |
| L | I, V |

[0669] The EPO variants generated for testing increased resistance to proteolysis are listed in Table 20 (SEQ ID NOS: 3-201). The variants generated were as follows: P2S, P2A, P3S, P3A, R4H, R4Q, L5I, L5V, C7S, C7V, C7A, C7I, C7T, D8Q, D8H, D8N, R10H, R10Q, L12V, L12I, E13Q, E13H, E13N, R14H, R14Q, Y15H, Y15I, L16I, L16V, L17I, L17V, E18Q, E18H, E18N, K20Q, K20T, K20N, E21Q, E21H, E21N, E23Q, E23H, E23N, C29S, C29V, C29A, C29I, C29T, E31Q, E31H, E31N, L35V, L35I, E37Q, E37H, E37N, P42S, P42A, D43Q, D43H, D43N, K45Q, K45T, K45N, F481, F48V, Y49H, Y49I, W51S, W51H, K52Q, K52T, K52N, R53H, R53Q, M54V, M54I, E55Q, E55H, E55N, E62Q, E62H, E62N, W64S, W64H, L67I, L67V, L69V, L69I, L70I, L70V, E72Q, E72H, E72N, L75V, L751, R76H, R76Q, L80V, L80I, L81I, L81V, P87S, P87A, W88S, W88H, E89Q, E89H, E89N, P90S, P90A, L91I, L91V, L93V, L93I, D96Q, D96H, D96N, K97Q, K97T, K97N, L102V, L102I, R103H, R103Q, L105I, L105V, L108I, L108V, L109I, L109V, R110H, R110Q, L112V, L112I, K116Q, K116T, K116N, E117Q, E117H, E117N, P121S, P121A, P122S, P122A, D123Q, D123H, D123N, P129S, P129A, L130V, L130I, R131H, R131Q, D136Q, D136H, D136N, F138I, F138V, R139H, R139Q, K140N, K140Q, L141I, L141V, F142I, F142V, R143H, R143Q, Y145H, Y145I, F148I, F148V, L149I, L149V, R150H, R150Q, K152Q, K152T, K152N, L153I, L153V, K154Q, K154T, K154N, L155V, L155I, Y156H, Y156I, E159Q, E159H, E159N, R162H, R162Q, D165Q, D165H, D165N, R166H, and R166Q.

TABLE 20
List of human EPO variants for testing increased resistance to proteolysis

| | | | | | | | | | |
|---|---|---|---|---|---|---|---|---|---|
| P2S | P2A | P3S | P3A | R4H | R4Q | L5I | L5V | C7S | C7V |
| C7A | C7I | C7T | D8Q | D8H | D8N | R10H | R10Q | L12V | L12I |
| E13Q | E13H | E13N | R14H | R14Q | Y15H | Y15I | L16I | L16V | L17I |
| L17V | E18Q | E18H | E18N | K20Q | K20T | K20N | E21Q | E21H | E21N |
| E23Q | E23H | E23N | C29S | C29V | C29A | C29I | C29T | E31Q | E31H |
| E31N | L35V | L35I | E37Q | E37H | E37N | P42S | P42A | D43Q | D43H |
| D43N | K45Q | K45T | K45N | F48I | F48V | Y49H | Y49I | W51S | W51H |
| K52Q | K52T | K52N | R53H | R53Q | M54V | M54I | E55Q | E55H | E55N |
| E62Q | E62H | E62N | W64S | W64H | L67I | L67V | L69V | L69I | L70I |
| L70V | E72Q | E72H | E72N | L75V | L75I | R76H | R76Q | L80V | L80I |
| L81I | L81V | P87S | P87A | W88S | W88H | E89Q | E89H | E89N | P90S |
| P90A | L91I | L91V | L93V | L93I | D96Q | D96H | D96N | K97Q | K97T |
| K97N | L102V | L102I | R103H | R103Q | L105I | L105V | L108I | L108V | L109I |
| L109V | R110H | R110Q | L112V | L112I | K116Q | K116T | K116N | E117Q | E117H |
| E117N | P121S | P121A | P122S | P122A | D123Q | D123H | D123N | P129S | P129A |
| L130V | L130I | R131H | R131Q | D136Q | D136H | D136N | F138I | F138V | R139H |
| R139Q | K140N | K140Q | L141I | L141V | F142I | F142V | R143H | R143Q | Y145H |
| Y145I | F148I | F148V | L149I | L149V | R150H | R150Q | K152Q | K152T | K152N |
| L153I | L153V | K154Q | K154T | K154N | L155V | L155I | Y156H | Y156I | E159Q |
| E159H | E159N | R162H | R162Q | D165Q | D165H | D165N | R166H | R166Q | |

### Example 2

### Production of Native and Modified Human EPO Polypeptides (Proteins) in Mammalian Cells and Yield Determination

[0670] Chinese Hamster Ovary (CHO) cells were grown in Dulbecco's Modified Eagle's Medium (DMEM, Invitrogen) with 10% fetal calf serum (FCS). The day before transfection, the CHO cells were plated in 6-well plates at a density of 5×10⁵ cells per well in DMEM with 10% FCS (without antibiotics), at 37° C. in a humid atmosphere with a composition of 7% CO₂ to achieve 50-90% confluency the following day for transfection.

[0671] CHO cells were transfected with 2 μg of EPO mutant DNA using Perfectin reagent (Ozyme) according to the manufacturer instructions. Cell plates were incubated for 4 hours in Opti-MEM® reduced serum medium (Invitrogen) post-transfection at 37° C. in a humid atmosphere with a composition of 7% CO₂. Following incubation, the transfection medium was replaced with 1 ml of fresh DMEM medium containing 1% FCS. Cell supernatants were collected 96 hours later, aliquoted into 96-well-plates, and stored at −80° C.

[0672] Concentrations of hEPO variant polypeptides in the collected cell supernatants was determined using a human erythropoietin specific ELISA kit (IBL, Hamburg, Germany) according to manufacturer instructions. hEPO variant concentration are standardized for use protease resistance assays.

### Example 3

### Determination of Specific Activity of Human EPO by TF-1 Proliferative Assay

[0673] Proliferation assays were performed for each aliquot sample undertaken at different time points of the protease degradation kinetic in the human erythroleukemia cell line TF-1 bioassay in order to determine residual proliferative activity (EC₅₀) contained in each kinetic point samples.

[0674] TF-1 cell line was maintained in RPMI 1640 medium (Invitrogen) supplemented with 10% FCS, 2 mM L-glutamine and 2 ng/ml of human recombinant GM-CSF at 37° C. in a humid atmosphere with a composition of 7% CO2/95% air in T175 (175 cm²) polystyrene tissue culture flask and split two times per week. Twenty four hours before use in proliferation assays, cells were washed two times in ice cold PBS and re-suspended for 16 hours in GM-CSF free RPMI medium supplemented with 2 mM glutamine and 10% FCS.

[0675] TF1 cells were plated into 96-well plate at 4×10⁴ cells per well in 70 μl of GM-CSF free RPMI medium supplemented with 2 mM glutamine and 10% FCS. Each aliquot sample was subjected to a two-fold serial dilution into 96-Deep-well plates and EPO dilutions (30 μl) were added to each well containing 70 μl of TF-1 cells with a final concentration ranging from 70000 to 34.2 pg/ml. Each EPO sample dilution was assessed in triplicate. No GM-CSF was added to the last row (“G” row) of the flat-bottomed 96-well plates in order to evaluate basal absorbance of non proliferative cells. A 2-fold serial dilution (70000 to 34.2 pg/ml) of internal positive controls including both the second international standard for EPO (NIBSC, 88/574) and the first international standard for GMCSF (NIBSC, 88/646) also were performed and added in triplicate to plate assay in order to standardize proliferation results.

[0676] The plates were incubated for 48 hours at 37° C. in a humidified, 7% CO2 atmosphere. After 48 hours of growth, 20 μl of Cell titer 96 Aqueous one solution reagent (Promega) was added to each well and incubated 3 hours at 37° C. in an atmosphere of 7% CO2. To measure the amount of colored soluble formazan produced by cellular reduction of the MTS, the absorbance of the dye was measured using an Elisa plate reader (Spectramax®) at 490 nm.

[0677] The corrected absorbances (“G” row basal value subtracted) obtained at 490 nm were plotted versus concentration of cytokine. The EC₅₀ value was calculated by determining the X-axis value corresponding to one-half the difference between the maximum and minimum absorbance values. (EC₅₀=the concentration of cytokine necessary to give one-half the maximum response).

### Example 4

### Resistance to Proteolysis

[0678] EPO variants were tested for protease resistance. To evaluate the protection of EPO mutants compared to wild-type EPO, enzymatic cleavage at different time treatment at 37° C. was performed. For each of the EPO mutants and EPO native protein, a solution mixture of proteases was prepared by mixing 400 μl of serum-free RPMI medium with a 1.5% protease mixture (wt/wt) containing each of the following proteases α-chymotrypsin, endoproteinase GluC and trypsin (Sigma). For the kinetic analysis, proteolytic degradation was initiated by adding the protease mixture solution to 557.2 ng of each EPO mutants or native protein in 300 μl of DMEM medium supplemented with 1% FCS(CHOK1 culture medium). Incubation times were: 0 h, 0.5 h, 1 h, 2, 3 h, 4 h, 5 h, 6 h, and 7 h. At the different kinetic time points, for each sample, a 70 μl of aliquot was taken and mixed with 10 μl of anti-proteases mixture (mini EDTA free, Roche—one tablet was dissolved in 10 ml of RPMI supplemented with 10% FCS) in order to stop proteolysis reactions. Samples were stored at −80° C. until determination of residual proliferative activity. Cell proliferation induction activity of the treated samples was assayed as described in Example 3 to determine residual proliferative activity at each time point. Resistance to proteases for exemplary non-limiting modified EPO polypeptides is displayed in Table 21 as either no change or increased resistance to proteases as compared to the residual proliferative activity of native EPO under the same protease treatment conditions.

[0679] The data are not meant to be representative of all proteases, but are exemplary data showing the resistance to proteolysis to an exemplary protease cocktail containing the proteases as described above. Thus, the data are not comprehensive and are not meant to be indicative that other EPO polypeptides do not exhibit protease resistance.

TABLE 21
Resistance to proteolysis of EPO native and mutant proteins

| Nemo | | Resistance |
|---|---|---|
| Code # | Mutation | to proteases |
| 1 | P2S | nt |
| 2 | P2A | − |
| 3 | P3S | − |
| 4 | P3A | + |
| 5 | R4H | + |
| 6 | R4Q | + |
| 7 | C7S | nt |
| 8 | C7V | nt |
| 9 | D8Q | + |
| 10 | D8H | − |
| 11 | R10H | + |
| 12 | R10Q | − |
| 13 | L12V | − |
| 14 | L12I | − |
| 15 | E18Q | + |
| 16 | E18H | − |
| 17 | K20Q | + |
| 18 | K20T | − |
| 19 | E21Q | + |
| 20 | E21H | − |
| 21 | E23Q | − |
| 22 | E23H | − |
| 23 | C29S | nt |
| 24 | C29V | nt |
| 25 | E31Q | + |
| 26 | E31H | − |
| 27 | L35V | − |
| 28 | L35I | − |
| 29 | E37Q | + |
| 30 | E37H | nt |
| 31 | P42S | nt |
| 32 | P42A | nt |
| 33 | D43Q | nt |
| 34 | D43H | nt |
| 35 | K45Q | − |
| 36 | K45T | + |
| 37 | F48I | − |
| 38 | F48V | + |
| 39 | Y49H | − |
| 40 | Y49I | + |
| 41 | W51S | − |
| 42 | W51H | nt |
| 43 | K52Q | + |
| 44 | K52T | − |
| 45 | R53H | + |
| 46 | R53Q | nt |
| 47 | M54V | − |
| 48 | M54I | − |
| 49 | E55Q | − |
| 50 | E55H | nt |
| 51 | E62Q | − |
| 52 | E62H | − |
| 53 | W64S | + |
| 54 | W64H | − |
| 55 | L69V | − |
| 56 | L69I | + |
| 57 | E72Q | nt |
| 58 | E72H | nt |
| 59 | L75V | nt |
| 60 | L75I | + |
| 61 | R76H | − |
| 62 | R76Q | − |
| 63 | L80V | − |
| 64 | L80I | + |
| 65 | P87S | + |
| 66 | P87A | + |
| 67 | W88S | − |
| 68 | W88H | nt |
| 69 | E89Q | + |
| 70 | E89H | + |
| 71 | P90S | + |
| 72 | P90A | nt |
| 73 | L93V | + |
| 74 | L93I | + |
| 75 | D96Q | + |
| 76 | D96H | + |
| 77 | K97Q | nt |
| 78 | K97T | nt |
| 79 | L102V | + |
| 80 | L102I | + |
| 81 | R110H | + |
| 82 | R110Q | + |
| 83 | L112V | nt |
| 84 | L112I | nt |
| 85 | K116Q | + |
| 86 | K116T | + |
| 87 | P121S | nt |
| 88 | P121A | + |
| 89 | P122S | + |
| 90 | P122A | + |
| 91 | D123Q | nt |
| 92 | D123H | + |
| 93 | P129S | + |
| 94 | P129A | + |
| 95 | L130V | nt |
| 96 | L130I | + |
| 97 | R131H | + |
| 98 | R131Q | + |
| 99 | D136Q | nt |
| 100 | D136H | nt |
| 101 | R143H | + |
| 102 | R143Q | + |
| 103 | Y145H | nt |
| 104 | Y145I | nt |
| 105 | R150H | + |
| 106 | R150Q | + |
| 107 | K152Q | nt |
| 108 | K152T | nt |
| 109 | K154Q | − |
| 110 | K154T | nt |
| 111 | L155V | nt |
| 112 | L155I | nt |
| 113 | E159Q | − |
| 114 | E159H | nt |
| 115 | R162H | nt |
| 116 | R162Q | nt |
| 117 | C29A | nt |
| 118 | C29I | nt |
| 119 | C29T | nt |
| 120 | C7A | nt |
| 121 | C7I | nt |
| 122 | C7T | nt |
| 123 | D123N | + |
| 124 | D136N | + |
| 125 | D43N | nt |
| 126 | D96N | − |
| 127 | E159N | + |
| 128 | E18N | nt |
| 129 | E21N | nt |
| 130 | E23N | nt |
| 131 | E31N | nt |
| 132 | E37N | nt |
| 133 | E55N | + |
| 134 | E62N | nt |
| 135 | E72N | nt |
| 136 | E89N | nt |
| 137 | K116N | + |
| 138 | K152N | nt |
| 139 | K154N | nt |
| 140 | K20N | nt |
| 141 | K45N | + |
| 142 | K52N | + |
| 143 | K97N | nt |
| 144 | D8N | nt |
| 145 | D165Q | + |
| 146 | D165H | + |
| 147 | D165N | + |
| 148 | R166H | + |
| 149 | R166Q | + |
| 354 | L5I | nt |
| 355 | L5V | − |
| 356 | E13Q | nt |
| 357 | E13H | nt |
| 358 | E13N | nt |
| 359 | R14H | nt |
| 360 | R14Q | nt |
| 361 | Y15H | nt |
| 362 | Y15I | nt |
| 363 | L16I | + |
| 364 | L16V | nt |
| 365 | L17I | nt |
| 366 | L17V | nt |
| 367 | L67I | + |
| 368 | L67V | nt |
| 369 | L70I | nt |
| 370 | L70V | nt |
| 371 | L81I | nt |
| 372 | L81V | nt |
| 373 | L91I | nt |
| 374 | L91V | + |
| 375 | R103H | nt |
| 376 | R103Q | nt |
| 377 | L105I | + |
| 378 | L105V | nt |
| 379 | L108I | nt |
| 380 | L108V | nt |
| 381 | L109I | nt |
| 382 | L109V | − |
| 383 | E117Q | nt |
| 384 | E117H | nt |
| 385 | E117N | nt |
| 386 | F138I | nt |
| 387 | F138V | nt |
| 388 | R139H | nt |
| 389 | R139Q | nt |
| 390 | K140N | nt |
| 391 | K140Q | nt |
| 392 | L141I | nt |
| 393 | L141V | nt |
| 394 | F142I | nt |
| 395 | F142V | nt |
| 396 | F148I | nt |
| 397 | F148V | nt |
| 398 | L149I | nt |
| 399 | L149V | nt |
| 400 | L153I | nt |
| 401 | L153V | + |
| 402 | Y156H | nt |
| 403 | Y156I | nt |

− = no change;
+ = Increased resistance to proteolysis;
nt = not tested

[0680] In a second experiment, resistance to proteolysis was measured using a higher concentration of proteases. The protocol used for the assay was the same as described above except that a 3% protease mixture (wt/wt) containing each of the following proteases, α-chymotrypsin, Endoproteinase GluC and trypsin (Sigma), was used for proteolysis. Data from this experiment is presented in Table 22. The data is expressed as relative resistance to proteases among the samples tested: (+), (++), or (+++), with (+++) indicating the highest resistance to proteases.

TABLE 22
Resistance to proteolysis of EPO native and mutant proteins

| Nemo | | Resistance |
|---|---|---|
| Code # | Mutation | to proteases |
| 1 | P2S | − |
| 2 | P2A | − |
| 3 | P3S | − |
| 4 | P3A | +++ |
| 5 | R4H | + |
| 6 | R4Q | + |
| 7 | C7S | nt |
| 8 | C7V | nt |
| 9 | D8Q | − |
| 10 | D8H | − |
| 11 | R10H | + |
| 12 | R10Q | − |
| 13 | L12V | − |
| 14 | L12I | − |
| 15 | E18Q | + |
| 16 | E18H | − |
| 17 | K20Q | +++ |
| 18 | K20T | − |
| 19 | E21Q | + |
| 20 | E21H | − |
| 21 | E23Q | − |
| 22 | E23H | − |
| 23 | C29S | nt |
| 24 | C29V | nt |
| 25 | E31Q | + |
| 26 | E31H | − |
| 27 | L35V | − |
| 28 | L35I | − |
| 29 | E37Q | + |
| 30 | E37H | − |
| 31 | P42S | nt |
| 32 | P42A | nt |
| 33 | D43Q | − |
| 34 | D43H | − |
| 35 | K45Q | − |
| 36 | K45T | ++ |
| 37 | F48I | ++ |
| 38 | F48V | + |
| 39 | Y49H | − |
| 40 | Y49I | + |
| 41 | W51S | − |
| 42 | W51H | − |
| 43 | K52Q | ++ |
| 44 | K52T | + |
| 45 | R53H | + |
| 46 | R53Q | nt |
| 47 | M54V | − |
| 48 | M54I | − |
| 49 | E55Q | − |
| 50 | E55H | − |
| 51 | E62Q | − |
| 52 | E62H | − |
| 53 | W64S | − |
| 54 | W64H | − |
| 55 | L69V | − |
| 56 | L69I | + |
| 57 | E72Q | nt |
| 58 | E72H | nt |
| 59 | L75V | − |
| 60 | L75I | + |
| 61 | R76H | − |
| 62 | R76Q | − |
| 63 | L80V | − |
| 64 | L80I | ++ |
| 65 | P87S | + |
| 66 | P87A | + |
| 67 | W88S | − |
| 68 | W88H | nt |
| 69 | E89Q | ++ |
| 70 | E89H | ++ |
| 71 | P90S | ++ |
| 72 | P90A | + |
| 73 | L93V | + |
| 74 | L93I | +++ |
| 75 | D96Q | +++ |
| 76 | D96H | + |
| 77 | K97Q | − |
| 78 | K97T | − |
| 79 | L102V | − |
| 80 | L102I | − |
| 81 | R110H | − |
| 82 | R110Q | + |
| 83 | L112V | − |
| 84 | L112I | nt |
| 85 | K116Q | + |
| 86 | K116T | ++ |
| 87 | P121S | − |
| 88 | P121A | + |
| 89 | P122S | + |
| 90 | P122A | + |
| 91 | D123Q | ++ |
| 92 | D123H | + |
| 93 | P129S | + |
| 94 | P129A | + |
| 95 | L130V | ++ |
| 96 | L130I | +++ |
| 97 | R131H | + |
| 98 | R131Q | ++ |
| 99 | D136Q | − |
| 100 | D136H | − |
| 101 | R143H | ++ |
| 102 | R143Q | +++ |
| 103 | Y145H | nt |
| 104 | Y145I | nt |
| 105 | R150H | +++ |
| 106 | R150Q | + |
| 107 | K152Q | − |
| 108 | K152T | − |
| 109 | K154Q | − |
| 110 | K154T | − |
| 111 | L155V | − |
| 112 | L155I | − |
| 113 | E159Q | − |
| 114 | E159H | − |
| 115 | R162H | − |
| 116 | R162Q | − |
| 117 | C29A | nt |
| 118 | C29I | nt |
| 119 | C29T | − |
| 120 | C7A | nt |
| 121 | C7I | nt |
| 122 | C7T | nt |
| 123 | D123N | ++ |
| 124 | D136N | ++ |
| 125 | D43N | + |
| 126 | D96N | + |
| 127 | E159N | +++ |
| 128 | E18N | − |
| 129 | E21N | − |
| 130 | E23N | − |
| 131 | E31N | − |
| 132 | E37N | − |
| 133 | E55N | − |
| 134 | E62N | − |
| 135 | E72N | − |
| 136 | E89N | + |
| 137 | K116N | ++ |
| 138 | K152N | − |
| 139 | K154N | nt |
| 140 | K20N | − |
| 141 | K45N | ++ |
| 142 | K52N | ++ |
| 143 | K97N | − |
| 144 | D8N | − |
| 145 | D165Q | ++ |
| 146 | D165H | ++ |
| 147 | D165N | ++ |
| 148 | R166H | ++ |
| 149 | R166Q | + |
| 354 | L5I | − |
| 355 | L5V | − |
| 356 | E13Q | − |
| 357 | E13H | − |
| 358 | E13N | − |
| 359 | R14H | − |
| 360 | R14Q | − |
| 361 | Y15H | − |
| 362 | Y15I | − |
| 363 | L16I | ++ |
| 364 | L16V | ++ |
| 365 | L17I | ++ |
| 366 | L17V | + |
| 367 | L67I | nt |
| 368 | L67V | nt |
| 369 | L70I | nt |
| 370 | L70V | nt |
| 371 | L81I | − |
| 372 | L81V | − |
| 373 | L91I | − |
| 374 | L91V | − |
| 375 | R103H | − |
| 376 | R103Q | − |
| 377 | L105I | + |
| 378 | L105V | − |
| 379 | L108I | − |
| 380 | L108V | − |
| 381 | L109I | − |
| 382 | L109V | − |
| 383 | E117Q | − |
| 384 | E117H | − |
| 385 | E117N | − |
| 386 | F138I | nt |
| 387 | F138V | − |
| 388 | R139H | +++ |
| 389 | R139Q | +++ |
| 390 | K140N | − |
| 391 | K140Q | − |
| 392 | L141I | − |
| 393 | L141V | − |
| 394 | F142I | nt |
| 395 | F142V | nt |
| 396 | F148I | nt |
| 397 | F148V | nt |
| 398 | L149I | − |
| 399 | L149V | − |
| 400 | L153I | − |
| 401 | L153V | ++ |
| 402 | Y156H | − |
| 403 | Y156I | nt |

− = no change;
+ = Increased resistance to proteolysis;
nt = not tested

[0681] For selection of EPO LEADS, residual proliferative activity was compared to the protein concentration of non-degraded EPO protein following exposure to proteases. EPO protein concentration for the experiment above (presented in Table 22) was determined using a human specific ELISA kit (R&D Systems) according to the manufacturer's instructions. The leads were selected by correlation of the two assays for level of residual proliferative activity relative to the amount of EPO protein in the sample to determine the EPO polypeptides with increased resistance to proteases. The data for selected EPO LEADs is presented in Table 23. The data is expressed as relative resistance to proteases among the selected EPO LEADs: (+), (++), or (+++), with (+++) indicating the highest resistance to proteases.

TABLE 23
Selected EPO LEADs

| Nemo | | Resistance |
|---|---|---|
| Code # | Mutation | to proteases |
| 5 | R4H | +++ |
| 105 | R150H | +++ |
| 102 | R143Q | +++ |
| 127 | E159N | +++ |
| 388 | R139H | +++ |
| 389 | R139Q | +++ |
| 74 | L93I | +++ |
| 75 | D96Q | +++ |
| 96 | L130I | +++ |
| 401 | L153V | +++ |
| 17 | K20Q | +++ |
| 37 | F48I | ++ |
| 98 | R131Q | ++ |
| 141 | K45N | ++ |
| 142 | K52N | ++ |
| 43 | K52Q | ++ |
| 64 | L80I | ++ |
| 86 | K116T | ++ |
| 123 | D123N | ++ |
| 124 | D136N | ++ |
| 71 | P90S | ++ |
| 145 | D165Q | ++ |
| 146 | D165H | ++ |
| 147 | D165N | ++ |
| 137 | K116N | ++ |
| 101 | R143H | ++ |
| 148 | R166H | ++ |
| 363 | L16I | ++ |
| 364 | L16V | ++ |

[0682] The data presented in the tables above are exemplary showing the resistance to proteolysis in a particular experiment with an exemplary protease cocktail containing the proteases as described above. Thus, the data are not comprehensive and are not meant to be indicative that other EPO polypeptides do not exhibit protease resistance.

### Example 5

### Resistance to Proteolysis Using an ELISA to Detect Residual Protein

[0683] Candidate EPO Lead polypeptides were tested for resistance to proteolysis as described above in Example 4, except instead of measuring the residual amount of protein by proliferative activity, the residual amount of protein was by ELISA. The ELISA provides more stringency in detection of the residual protein then the proliferation assay. In addition, endoproteinase AspN was added to the protease mixture. Briefly, a mixture of proteases was prepared by mixing 400 μl of FCS free RPMI medium with a 1.5% protease mixture (wt/wt) containing α-chymotrypsin, Endoproteinase GluC, Endoproteinase AspN and trypsin (Sigma). Proteolytic degradation kinetic was initiated by adding the protease mixture solution to each EPO polypeptide in DMEM medium supplemented with 1% FCS(CHOK1 culture medium). The EPO polypeptides were incubated with the proteases at 37° C. An aliquot was taken from each sample at the different kinetic time points and mixed with an anti-protease preparation (mini EDTA free, Roche—one tablet was dissolved in 10 ml of RPMI supplemented with 10% FCS) to stop proteolysis. The samples were frozen at −80° C. before the remaining concentration of EPO in each sample was determined using a Quantikine IVD human EPO ELISA kit (R&D Systems, UK). The percentage of the original concentration prior to proteolysis was then determined. Specific activity of each EPO Lead polypeptide was measured as described in Example 3. The results are set forth in Table 24 below. Although this assay was more stringent in detecting residual protein, the results are consistent with the results in Example 4 above and show that EPO LEAD candidates containing modifications R4H; K20Q; F48I; K52Q; L80I; P90S; L93V; L93I; D96Q; K116T; L130I; R131H; R131Q; R143H; R143Q; R150H; D123N; D136N; E159N; K116N; K45N; K52N; D165Q; D165H; D165N; R166H; L16I; L16V; R139H; R139Q; and L153V exhibit increased protease resistance under these assay conditions. The data presented are exemplary and reflect protease resistance under specific experimental conditions, and thus are not comprehensive and are not meant to be indicative that other EPO polypeptides do not exhibit protease resistance.

TABLE 24

| Nemo | | | Resistance to | Specific |
|---|---|---|---|---|
| Code | Mutant | Production | proteolysis | Activity |
| 1 | P2S | | No change | No change |
| 2 | P2A | | No change | No change |
| 3 | P3S | | No change | No change |
| 4 | P3A | | No change | No change |
| 5 | R4H | | Increase+++ | No change |
| 6 | R4Q | | No change | No change |
| 7 | C7S | Not produced | Not tested | |
| 8 | C7V | Not produced | Not tested | |
| 9 | D8Q | | No change | No change |
| 10 | D8H | | No change | No change |
| 11 | R10H | | No change | No change |
| 12 | R10Q | | No change | No change |
| 13 | L12V | | No change | No change |
| 14 | L12I | | No change | No change |
| 15 | E18Q | | No change | No change |
| 16 | E18H | | No change | No change |
| 17 | K20Q | | Increase++ | No change |
| 18 | K20T | | No change | No change |
| 19 | E21Q | | No change | No change |
| 20 | E21H | | No change | No change |
| 21 | E23Q | | No change | No change |
| 22 | E23H | | No change | No change |
| 23 | C29S | | No change | No change |
| 24 | C29V | | No change | No change |
| 25 | E31Q | | No change | No change |
| 26 | E31H | | No change | No change |
| 27 | L35V | | No change | No change |
| 28 | L35I | | No change | No change |
| 29 | E37Q | | No change | No change |
| 30 | E37H | | No change | No change |
| 31 | P42S | | No change | No change |
| 32 | P42A | | No change | No change |
| 33 | D43Q | | No change | No change |
| 34 | D43H | | No change | No change |
| 35 | K45Q | | No change | No change |
| 36 | K45T | | No change | No change |
| 37 | F48I | | Increase++ | No change |
| 38 | F48V | | No change | No change |
| 39 | Y49H | | No change | No change |
| 40 | Y49I | | No change | No change |
| 41 | W51S | | No change | No change |
| 42 | W51H | | No change | No change |
| 43 | K52Q | | Increase++ | No change |
| 44 | K52T | | No change | No change |
| 45 | R53H | | No change | No change |
| 46 | R53Q | Not produced | Not tested | |
| 47 | M54V | | No change | No change |
| 48 | E54I | | No change | No change |
| 49 | E55Q | | No change | No change |
| 50 | E55H | | No change | No change |
| 51 | E62Q | | No change | No change |
| 52 | E62H | | No change | No change |
| 53 | W64S | Not produced | Not tested | |
| 54 | W64H | Not produced | Not tested | |
| 55 | L69V | | No change | No change |
| 56 | L69I | | No change | No change |
| 57 | E72Q | | No change | No change |
| 58 | E72H | Not produced | Not tested | |
| 59 | L75V | Not produced | Not tested | |
| 60 | L75I | | No change | No change |
| 61 | R76H | | No change | No change |
| 62 | R76Q | | No change | No change |
| 63 | L80V | | No change | No change |
| 64 | L80I | | Increase++ | No change |
| 65 | P87S | | No change | No change |
| 66 | P87A | | No change | No change |
| 67 | W88S | | No change | No change |
| 68 | W88H | | No change | No change |
| 69 | E89Q | | No change | No change |
| 70 | E89H | | No change | No change |
| 71 | P90S | | Increase+ | No change |
| 72 | P90A | | No change | No change |
| 73 | L93V | | Increase++ | No change |
| 74 | L93I | | Increase++ | No change |
| 75 | D96Q | | Increase+ | No change |
| 76 | D96H | | No change | No change |
| 77 | K97Q | | No change | No change |
| 78 | K97T | | No change | No change |
| 79 | L102V | Not produced | Not tested | |
| 80 | L102I | Not produced | Not tested | |
| 81 | R110H | Not produced | Not tested | |
| 82 | R110Q | | No change | No change |
| 83 | L112V | | No change | No change |
| 84 | L112I | | No change | No change |
| 85 | K116Q | | No change | No change |
| 86 | K116T | | Increase++ | No change |
| 87 | P121S | | No change | No change |
| 88 | P121A | | No change | No change |
| 89 | P122S | | No change | No change |
| 90 | P122A | | No change | No change |
| 91 | D123Q | | No change | No change |
| 92 | D123H | | No change | No change |
| 93 | P129S | | No change | No change |
| 94 | P129A | | No change | No change |
| 95 | L130V | | No change | No change |
| 96 | L130I | | Increase++ | No change |
| 97 | R131H | | Increase++ | No change |
| 98 | R131Q | | Increase+ | No change |
| 99 | D136Q | | No change | No change |
| 100 | D136H | | No change | No change |
| 101 | R143H | | Increase++ | No change |
| 102 | R143Q | | Increase++ | No change |
| 103 | Y145H | | No change | No change |
| 104 | Y145I | | No change | No change |
| 105 | R150H | | Increase++ | Decrease |
| 106 | R150Q | | No change | No change |
| 107 | K152Q | | No change | No change |
| 108 | K152T | | No change | No change |
| 109 | K154Q | | No change | No change |
| 110 | K154T | | No change | No change |
| 111 | L155V | | No change | No change |
| 112 | L155I | | No change | No change |
| 113 | E159Q | | No change | No change |
| 114 | E159H | | No change | No change |
| 115 | R162H | | No change | No change |
| 116 | R162Q | | No change | No change |
| 117 | C29A | | No change | No change |
| 118 | C29I | | No change | No change |
| 119 | C29T | | No change | No change |
| 120 | C7A | Not produced | Not tested | |
| 121 | C7I | Not produced | Not tested | |
| 122 | C7T | Not produced | Not tested | |
| 123 | D123N | | Increase++ | No change |
| 124 | D136N | | Increase+ | No change |
| 125 | D43N | | No change | No change |
| 126 | D96N | | No change | No change |
| 127 | E159N | | Increase++ | No change |
| 128 | E18N | | No change | No change |
| 129 | E21N | | No change | No change |
| 130 | E23N | | No change | Decrease |
| 131 | E31N | | No change | No change |
| 132 | E37N | | No change | No change |
| 133 | E55N | | No change | No change |
| 134 | E62N | | No change | No change |
| 135 | E72N | Not produced | Not tested | |
| 136 | E89N | | No change | No change |
| 137 | K116N | | Increase++ | No change |
| 138 | K152N | Not produced | Not tested | |
| 139 | K154N | Not produced | Not tested | |
| 140 | K20N | | No change | No change |
| 141 | K45N | | Increase++ | Decrease |
| 142 | K52N | | Increase++ | No change |
| 143 | K97N | | No change | No change |
| 144 | D8N | | No change | No change |
| 145 | D165Q | | Increase+ | No change |
| 146 | D165H | | Increase++ | No change |
| 147 | D165N | | Increase++ | No change |
| 148 | R166H | | Increase | No change |
| 149 | R166Q | | No change | No change |
| 354 | L5I | | No change | No change |
| 355 | L5V | | No change | No change |
| 356 | E13Q | | No change | No change |
| 357 | E13H | | No change | No change |
| 358 | E13N | | No change | No change |
| 359 | R14H | | No change | No change |
| 360 | R14Q | | No change | No change |
| 361 | Y15H | | No change | No change |
| 362 | Y15I | | No change | No change |
| 363 | L16I | | Increase++ | No change |
| 364 | L16V | | Increase+ | No change |
| 365 | L17I | | No change | No change |
| 366 | L17V | | No change | No change |
| 367 | L67I | | No change | No change |
| 368 | L67V | | No change | No change |
| 369 | L70I | | No change | No change |
| 370 | L70V | | No change | No change |
| 371 | L81I | | No change | No change |
| 372 | L81V | | No change | No change |
| 373 | L91I | | No change | No change |
| 374 | L91V | | No change | No change |
| 375 | R103H | Not produced | Not tested | |
| 376 | R103Q | Not produced | Not tested | |
| 377 | L105I | | No change | No change |
| 378 | L105V | | No change | No change |
| 379 | L108I | | No change | No change |
| 380 | L108V | | No change | No change |
| 381 | L109I | | No change | No change |
| 382 | L109V | | No change | No change |
| 383 | E117Q | | No change | No change |
| 384 | E117H | | No change | No change |
| 385 | E117N | | No change | No change |
| 386 | F138I | | No change | No change |
| 387 | F138V | | No change | No change |
| 388 | R139H | | Increase+++ | No change |
| 389 | R139Q | | Increase++ | No change |
| 390 | K140N | | No change | No change |
| 391 | K140Q | | No change | No change |
| 392 | L141I | | No change | No change |
| 393 | L141V | | No change | No change |
| 394 | F142I | | No change | No change |
| 395 | F142V | Not produced | Not tested | |
| 396 | F148I | | No change | No change |
| 397 | F148V | Not produced | Not tested | |
| 398 | F149I | | No change | No change |
| 399 | L149V | | No change | No change |
| 400 | L153I | | No change | No change |
| 401 | L153V | | Increase++ | No change |
| 402 | Y156H | | No change | No change |
| 403 | Y156I | Not produced | Not tested | |

### Example 6

### Resistance to Proteolysis of SuperLeads

[0684] Individual LEADs exhibiting increased resistance to proteolysis in the experiments described in Example 4 and Example 5 were combined to generate SuperLead polypeptides. Each of the exemplary Super-Lead polypeptides were designed containing the modification R4H and one or more additional candidate LEAD modifications exhibiting increased resistance to proteolysis set forth in Example 4 and 5 above. The exemplary SuperLeads that were generated were tested for resistance to proteolysis as described in Example 5 above and for specific activity as described in Example 3 above. The data are set forth in Table 25 below.

TABLE 25

| Nemo | | | Resistance to | Specific |
|---|---|---|---|---|
| Code | Mutant | Production | proteolysis | activity |
| 404 | R4H/R150H | | Increase ++ | Decrease |
| 405 | R4H/R143Q | | Increase +++ | No change |
| 406 | R4H/E159N | | Increase++ | No change |
| 407 | R4H/R139H | | Increase+++ | No change |
| 408 | R4H/R139Q | | Increase+++ | No change |
| 409 | R4H/L93I | | Increase+ | No change |
| 410 | R4H/D96Q | | No change | No change |
| 411 | R4H/L130I | | Increase + | No change |
| 412 | R4H/L153V | | Increase + | Increase + |
| 413 | R4H/K20Q | | Increase++ | No change |
| 414 | R4H/F48I | | Increase ++ | No change |
| 415 | R4H/R131Q | | No change | No change |
| 416 | R4H/K45N | | Increase ++ | Decrease |
| 417 | R4H/K52N | | Increase + | No change |
| 418 | R4H/K52Q | | Increase + | No change |
| 419 | R4H/L80I | Not produced | Not tested | |
| 420 | R4H/K116T | | No change | No change |
| 421 | R4H/D123N | | Increase+++ | No change |
| 422 | R4H/D136N | | Increase+ | No change |
| 423 | R4H/P90S | | No change | No change |
| 424 | R4H/D165Q | | Increase + | No change |
| 425 | R4H/D165H | | Increase+ | No change |
| 426 | R4H/D165N | | Increase++ | No change |
| 427 | R4H/K116N | | No change | No change |
| 428 | R4H/R143H | | No change | No change |
| 429 | R4H/R166H | | Increase+ | No change |
| 430 | R4H/L16I | | Increase+++ | No change |
| 431 | R4H/L16V | | No change | No change |
| 432 | R4H/L93I/R143Q | | Increase++ | No change |
| 433 | R4H/L93I/R150H | | Increase ++ | Decrease |
| 434 | R4H/R143Q/R150H | | Increase | Decrease |
| 435 | R4H/L93I/E159N | | Increase++ | No change |

### Example 7

### Identification of Possible Sites for Proteolysis that are Hidden by Glycosylation

[0685] To identify sensitive sites to proteolysis that could be hidden by glycosylation on native EPO, EPO variants containing the amino acid substitution N24H (SEQ ID NO:244), N38H (SEQ ID NO:245) or N83H (SEQ ID NO:246), respectively, were generated and tested for their resistance to proteolysis. Each de-glycosylated variant was expressed in CHO cells. Briefly, the day before transfection, CHO cells were plated into 6-well plates at 5×10⁵ cells per well in DMEM medium (Invitrogen, CA) containing 10% FCS at 37° C. in a humid atmosphere. CHO cells were transfected with 2 μg of EPO mutant DNA using Perfectin reagent (Ozyme, France) according to the manufacturer instructions. The transfected cells were incubated for 4 hours in Optimem medium (Invitrogen, CA) post-transfection at 37° C. in a humid atmosphere. The transfection medium was then replaced with 1 ml of fresh DMEM medium containing 1% FCS and cell supernatants containing the EPO polypeptides were harvested 96 hours later, aliquoted and stored at −80° C. The concentration of each EPO variant was standardized using Quantikine IVD human EPO ELISA kit (R&D Systems, UK), according to manufacturer instructions.

[0686] To evaluate the sensitivity to proteases of each variant, compared to a fully glycosylated native EPO polypeptide, enzymatic cleavage during incubation with a set of proteases was performed. A mixture of proteases was prepared by mixing 400 μl of serum-free RPMI medium with a 1.5% protease mixture (wt/wt) containing α-chymotrypsin, Endoproteinase GluC and trypsin (Sigma). Proteolytic degradation kinetic was initiated by adding the protease mixture solution to each EPO polypeptide in DMEM medium supplemented with 1% FCS(CHOK1 culture medium). The EPO polypeptides were incubated with the proteases at 37° C. An aliquot was taken from each sample at the different kinetic time points (0 hr, 0.5 hr, 1 hr, 2 r, 3 hr, 4 hr, 5 hr, 6 hr, and 8 hr) and mixed with an anti-protease mixture (mini EDTA free, Roche—one tablet was dissolved in 10 ml of RPMI supplemented with 10% FCS) to stop proteolysis. The samples were frozen at −80° C. before the concentration of EPO in each sample was determined by ELISA, as described above.

[0687] It was observed that mutation of the N38 glycosylation site resulted in an EPO variant that was highly susceptible to proteolysis. Mutation of the N83 and N24 glycosylation sites resulted in EPO variants that were susceptible to proteolysis at intermediate or lower levels, respectively. Thus, N38 was found to be the most sensitive site, N83 was considered the intermediate site and N24 was considered the less sensitive site.

[0688] Analysis of the distance from the N-glycosylation sites to is-HITs identified in Example 1.2 as sites that are sensitive to proteolysis was performed to determine which of the is-HITs may be “hidden” in glycosylated EPO polypeptides, but exposed to proteases upon de-glycosylation. Table 26 provides is-HITs (numbering corresponds to amino acid positions in the mature hEPO polypeptide set forth in SEQ ID NO: 2, i.e., without the signal peptide) that are within a radius of 10 Å or 15 Å from the sites of glycosylation.

TABLE 26
Distance of is-HITs from N-glycosylation sites

| N- | is-HITs within | |
|---|---|---|
| glycosylation | 10 Å from N- | is-HITs within 15 Å |
| site | Glycosylation sites | from N-Glycosylation sites |
| N24 | L17, K20, E21, | R14, L16, E18, E31, W88, E89, |
| | E23, F142, R143 | P90, L91, L93, K97, F138, R139, |
| | | K140, L141, Y145 |
| N38 | L35, E37, R76, | P42, D43, L69, L70, E72, L75, |
| | L80, D136, F138, | L81, P129, L130, R131, R139, |
| | K140 | L141, F142 |
| N83 | L35, L75, R76, | E37, E72, P87, W88, P90, L91, |
| | L80, L81 | L93, D96 |

### Example 8

### Generation of De-Glycosylated EPO Variants with Increased Resistance to Proteolysis

[0689] EPO polypeptides with reduced glycosylation were modified at one or more selected is-HIT positions to generate de-glycosylated EPO variants with increased resistance to proteolysis. Three initial pathways were followed to identify mutations that have a protective effect on the partially de-glycosylated EPO mutants, described in sections 1-3, below. The EPO polypeptides were incrementally de-glycosylated by serial mutation of one of N38 and N83. For each round of de-glycosylation, mutations at selected is-HIT positions also were introduced into the polypeptide to remove sites sensitive to proteolysis and determine which mutations were protective for variants de-glycosylated at N38 and N83. These mutations included the amino acid substitutions R139H, K20Q, E159N, L153V, K52N, L80I, L93I, L93V, and R4H, which are mutations carried by the LEADs identified in Examples 1-4 as having a protective effect against proteolysis. The EPO variants were assessed for protease resistance and variants that displayed increased protease resistance were used as the template into which new mutations were introduced. The final step of the process, described in section 4, below, involved mutation of the last N-glycosylation site, N24, and incorporation of mutations shown to be protective to generate EPO variants with no N-glycosylation that were protected against proteolysis.

[0690] The EPO variants were generated and expressed using the methods described in Example 1 and 2, above, and the concentrations were determined by ELISA, as described above. A fully glycosylated native EPO polypeptide also produced. A fully non-glycosylated EPO polypeptide was generated by de-glycosylation of a glycosylated EPO protein (European pharmacopeia (EP) reference standard; E1515000, Batch 3.0). De-glycosylation was effected using the GlycoPro Enzymatic Deglycosylation Kit (Prozyme, GK80110) according to the manufacturer's instructions. Briefly, 1×10⁷ pg/ml of EPO was incubated overnight at 37° C. with 1× incubation buffer containing N-glycanase PNGase F, Sialidase A, O-Glycanase, Galactosidase b (1-4) and b-N-Acetyl Glucosaminidase.

[0691] To evaluate the resistance to proteolysis of the EPO mutants and control polypeptides (fully glycosylated native EPO, and fully de-glycosylated EPO), enzymatic cleavage at 37° C. over a period of time was performed. A mixture of proteases was prepared by mixing 400 μl of FCS free RPMI medium with a 1.5% protease mixture (wt/wt) containing α-chymotrypsin, Endoproteinase GluC and trypsin (Sigma). Proteolytic degradation kinetic was initiated by adding the protease mixture solution to each EPO polypeptide in DMEM medium supplemented with 1% FCS(CHOK1 culture medium). The EPO polypeptides were incubated with the proteases at 37° C. An aliquot was taken from each sample at the different kinetic time points and mixed with an anti-protease preparation (mini EDTA free, Roche—one tablet was dissolved in 10 ml of RPMI supplemented with 10% FCS) to stop proteolysis. The samples were frozen at −80° C. before the remaining concentration of EPO in each sample was determined using a Quantikine IVD human EPO ELISA kit (R&D Systems, UK). The percentage of the original concentration prior to proteolysis was then determined.

[0692] 1. Generation of Partially De-Glycosylated N38H EPO Variants with Increased Resistance to Proteolysis

[0693] The first experimental pathway identified protease-resistant EPO polypeptides that were partially de-glycosylated due to the N38H mutation. To reverse the sensitivity to proteolysis observed for the partially de-glycosylated EPO polypeptide containing the N38H mutation, select LEAD mutations identified in Examples 2 to 4 were serially incorporated into the N38H variant polypeptide and tested for resistance to proteolysis. EPO polypeptides with full glycosylation or no glycosylation (i.e. full de-glycosylation) also were tested.

[0694] The R139H mutation was first incorporated into the N38H variant to generate the N38H/R139H EPO variant (SEQ ID NO:247). The N38H variant, and fully glycosylated and de-glycosylated polypeptides also were assayed, as described above, for resistance to proteolysis. The EPO variant containing both the N38H and R139H mutations showed a degree of sensitivity to proteolysis similar to that of the fully glycosylated native EPO. The concentration of both the fully glycosylated EPO and the partially de-glycosylated N38H/R139H EPO variant after 1 hour of proteolysis was 48% and 44%, respectively, of the starting concentration. In comparison, only 17% of the unprotected N38H variant remained after 1 hour. Essentially all of the fully de-glycosylated EPO polypeptide was cleaved by the proteases during the 1 hour incubation. After 2 hours of proteolysis, only 2% of the unprotected N38H variant remained, compared to 15% and 14% of the of the fully glycosylated EPO and the partially de-glycosylated N38H/R139H EPO variant, respectively. These results indicated that the R139H mutation was able to replace the protective effect that glycosylation at amino acid position N38 normally affords the EPO polypeptide.

[0695] Additional mutations identified in Examples 2 to 4 and contained in LEADs were then incorporated into the EPO variant carrying the N38H and R139H mutations to generate triple mutant EPO polypeptides. EPO polypeptides containing the N38H/R139H double mutation and R4H (SEQ ID NO:248), L93I (SEQ ID NO:249), K20Q (SEQ ID NO:250), E159N (SEQ ID NO:251), K52N (SEQ ID NO:252) and L153V (SEQ ID NO:253), respectively, were generated and assessed for susceptibility to various proteases. In some instances, the incorporation of a LEAD mutation into the N38H/R139H EPO variant to remove additional protease sensitive sites resulted in increased resistance to proteolysis compared to the both the N38H/R139H double mutant, and the fully glycosylated native EPO. After 1 hour of proteolysis, approximately 46% the N38H/R139H variant and the fully-glycosylated EPO polypeptide remained. Similar or slightly better results were obtained for the variants carrying the N38H/R139H/R4H, N38H/R139H/K52N or N38H/R139H/L93I mutations. The concentration of the partially de-glycosylated N38H/R139H/L153V and N38H/R139H/E159N variants after 1 hour of proteolysis was approximately 60% of the starting concentration. The triple N38H/R139H/K20Q variant was identified as the variant with the most resistance to proteolysis, with 64% of the protein remaining after 1 hour of proteolysis. After 2 hours incubation with the proteases, 43% of the N38H/R139H/K20Q variant remained, compared to approximately 14% and 18% of the N38H/R139H mutant and the fully glycosylated native EPO, respectively.

[0696] 2. Generation of Partially De-Glycosylated N38H/N83H EPO Variants with Increased Resistance to Proteolysis

[0697] The second experimental pathway identified protease-resistant EPO polypeptides that were partially de-glycosylated due to mutation of both the N38 and N83. The R139H mutation was incorporated into an EPO variant containing the N38H/N83H double mutation. The resulting N38H/N83H/R139H variant (SEQ ID NO: 254) was used as a template into which a further mutation, K20Q, was incorporated, generating the quadruple mutant K20Q/N38H/N83H/R139H (SEQ ID NO:255). The EPO variants were expressed in CHO cells and assayed for proteolysis resistance, as described above. EPO variants containing the single N38H mutation or the double N38H/R139H mutation, and fully glycosylated and de-glycosylated EPO polypeptides, also were assayed for protease resistance. The N38H/N83H/R139H variant exhibited reduced resistance to proteolysis compared to the N38H/R139H variant and the fully glycosylated EPO protein, with just 17% remaining after 1 hour of proteolysis, compared to 45% and 49%, respectively. This demonstrated how much protection against proteolysis glycosylation at N83 affords EPO polypeptides. This protection was restored, however, by incorporation of the K20Q mutation. The quadruple K20Q/N38H/N83H/R139H mutant exhibited a similar degree of resistance to proteolysis as that observed for the N38H/R139H variant and the fully glycosylated EPO protein. After 1 hour of proteolysis, 48% of the K20Q/N38H/N83H/R139H variant remained. After 2 hours of proteolysis, 21% remained, which was slightly more than observed for the N38H/R139H variant (16%) and slightly less than the fully glycosylated EPO protein (25%).

[0698] 3. Generation of Partially De-Glycosylated N38H/N83H EPO Variants with Increased Resistance to Proteolysis

[0699] The third experimental pathway utilized the N38H/N83H/R139H variant as a template into which additional mutations were incorporated to assess the ability of these mutations to increase resistance to proteolysis. EPO variants containing N38H/N83H/R139H and one of L93V (SEQ ID NO:256), L801 (SEQ ID NO:257) or L93I (SEQ ID NO:258) were generated and expressed in CHO cells. The variants were assessed for resistance to proteases, as were the N38H/N83H/R139H variant and fully glycosylated and de-glycosylated EPO polypeptides. The inclusion of any one of the L93V, L801 and L93I mutations into a N38H/N83H/R139H background conferred increased resistance to proteases compared to the N38H/N83H/R139H mutant. After 1 hour of proteolysis, 26% of the N38H/N83H/R139H remained and 46% of the fully glycosylated native EPO remained. In comparison, 30%, 37% and 45% of the N38H/N83H/R139H/L93I, N38H/N83H/R139H/L801 and N38H/N83H/R139H/L93V variants, respectively, remained after 1 hour of incubation with the proteases. After 2 hours of proteolysis, 8% of the N38H/N83H/R139H/L801 and N38H/N83H/R139H/L93V variants and 3% of the N38H/N83H/R139H/L93I variant remained, compared with 14% of the fully glycosylated protein and 4% of the N38H/N83H/R139H variant.

[0700] Each of the quadruple mutants (N38H/R139H/N83H/L801 (SEQ ID NO:257), N38H/R139H/N83H/L93I (SEQ ID NO:258) and N38H/R139H/N83H/L93V (SEQ ID NO:256)) were termed “Umbrella 83” variants, and used as templates into which the additional mutation of a K20Q substitution was introduced. This resulted in the generation of the following variants: K20Q/N38H/L80I/N83H/R139H (SEQ ID NO:259); K20Q/N38H/N83H/L93I/R139H (SEQ ID NO:260); and K20Q/N38H/N83H/L93V/R139H (SEQ ID NO:261). These variants also were assessed for protease resistance using the assays described above. Incorporation of the K20Q mutation into the Umbrella 83 variants conferred increased protease resistance to the EPO polypeptides compared to the N38H/N83H/R139H variant. After 1 hour of proteolysis, 37% of initial concentration of the N38H/N83H/R139H variant remained. In comparison, 58% of the K20Q/N38H/L80I/N83H/R139H and K20Q/N38H/N83H/L93V/R139H variants, and 71% of the K20Q/N38H/N83H/L93I/R139H variant remained. This level of protease resistance was comparable to the fully-glycosylated EPO polypeptide (71% remaining).

[0701] 4. Generation of Fully De-Glycosylated N24H/N38H/N83H EPO Variants with Increased Resistance to Proteolysis

[0702] The three pathways described above in parts 1-3 identified mutations that conferred significant protease resistance to partially de-glycosylated EPO polypeptides. In particular, the is-HIT position K20 appeared to be a key site in proteolysis, such that appropriate mutation at this position conferred increased protease resistance to the partially de-glycosylated EPO polypeptides containing mutations at N38 and/or N83. Because of its close proximity to the other N-glycosylation site, N24, it was hypothesized that the K20H mutation also may be protective for de-glycosylation at position 24. To assess the ability of the K20H mutation, and other LEAD mutations, to confer protease resistance to de-glycosylated EPO polypeptides, a series of variants were generated in which each of the N-glycosylation site were mutated.

[0703] The first series of variants were generated by introducing the N24H mutation into the Umbrella 83 mutants (from Example 6.3, above). The resulting fully de-glycosylated EPO variants thus contained the following mutations: N24H/N38H/N83H/R139H/L80I (SEQ ID NO:262); N24H/N38H/N83H/R139H/L93I (SEQ ID NO:263); or N24H/N38H/N83H/R139H/L93V (SEQ ID NO:264). These variants were assayed with the N38H, N38H/R139H, and N38H/N83H/R139H variants, and native fully glycosylated and de-glycosylated polypeptides for resistance to proteolysis. Removal of the N24 glycosylation site by mutagenesis reduced the resistance of the EPO variants compared to the full glycosylated EPO polypeptide and the partially de-glycosylated N38H/R139H variant, but remained markedly more resistance compared to the fully de-glycosylated control EPO polypeptide. The concentration of the fully glycosylated EPO and the partially de-glycosylated N38H/R139H and N38H EPO variants after 1 hour of proteolysis was 70%, 62% and 27%, respectively, of the starting concentration. Only 4% of the fully de-glycosylated native EPO polypeptide remained un-cleaved by the proteases after 1 hour. In comparison, 21%, 22% and % of the de-glycosylated N24H/N38H/N83H/R139H/L93I, N24H/N38H/N83H/R139H/L801 and N24H/N38H/N83H/R139H/L93V variants remained after 1 hour.

[0704] To assess the protective effect of the K20Q mutation on the fully de-glycosylated variants described above, each of the N24H/N38H/N83H/R139H/L80I, N24H/N38H/N83H/R139H/L93I, or N24H/N38H/N83H/R139H/L93V variants were used as a template into which the K20Q mutation was engineered. The resulting fully de-glycosylated EPO variants thus contained the following mutations: K20Q/N24H/N38H/N83H/R139H/L801 (SEQ ID NO:265); K20Q/N24H/N38H/N83H/R139H/L93I (SEQ ID NO:266); or K20Q/N24H/N38H/N83H/R139H/L93V (SEQ ID NO:267). These variants were assayed with the N38H, N38H/R139H, and N38H/N83H/R139H variants, and native fully glycosylated and de-glycosylated polypeptides for resistance to proteolysis. The de-glycosylated K20Q/N24H/N38H/N83H/R139H/L80I, K20Q/N24H/N38H/N83H/R139H/L93I, and K20Q/N24H/N38H/N83H/R139H/L93V variants exhibited similar resistance to proteases as observed for the N38H/N83H/R139H variant, with the amount of polypeptide remaining un-cleaved by the proteases ranging from 35% to 42%. This level of resistance was much higher than that observed for the fully de-glycosylated EPO polypeptide that contained no protective mutations (4% remaining), but less than that exhibited by the fully glycosylated native EPO polypeptide (71% remaining) and the partially de-glycosylated N38H/R139H variant (62% remaining).

[0705] Additional LEAD mutations were incorporated into the de-glycosylated variants to determine whether fully de-glycosylated EPO polypeptides could be protected from proteolysis. The resulting de-glycosylated EPO variants included: R4H/K20Q/N24H/N38H/N83H/R139H/L80I (SEQ ID NO:268); E159N/K20Q/N24H/N38H/N83H/R139H/L93I (SEQ ID NO:269); K20Q/N24H/N38H/N83H/R139H/L153V (SEQ ID NO:270); L153V/K20Q/N24H/N38H/N83H/R139H/L80I (SEQ ID NO:271) and E159N/K20Q/N24H/N38H/N83H/R139H/L80I (SEQ ID NO:272). These variants were assayed with the N38H, N38H/R139H, and N38H/N83H/R139H variants, and native fully glycosylated and de-glycosylated polypeptides for resistance to proteolysis. Each of these new variants exhibited a degree of resistance to proteolysis equal to, or slightly higher, that of the fully glycosylated native EPO polypeptide. After 1 hour of proteolysis, the percentage of the initial concentration of polypeptide remaining was 75% for E159N/K20Q/N24H/N38H/N83H/R139H/L93I, 76% for K20Q/N24H/N38H/N83H/R139H/L153V, 79% for R4H/K20Q/N24H/N38H/N83H/R139H/L80I and L153V/K20Q/N24H/N38H/N83H/R139H/L80I, and 81% for E159N/K20Q/N24H/N38H/N83H/R139H/L80I. By comparison, only 71% of the fully glycosylated EPO polypeptide remained after 1 hour of proteolysis, and just 4% of the fully de-glycosylated EPO remained. After 2.5 hours of proteolysis, the percentage of the initial concentration of EPO polypeptide still remaining was 24% for K20Q/N24H/N38H/N83H/R139H/L153V, 25% for L153V/K20Q/N24H/N38H/N83H/R139H/L80I, E159N/K20Q/N24H/N38H/N83H/R139H/L80I and E159N/K20Q/N24H/N38H/N83H/R139H/L93I, and 27% for R4H/K20Q/N24H/N38H/N83H/R139H/L80I. By comparison, 23% of the fully glycosylated EPO polypeptide remained after 2 hours of proteolysis, and none of the fully de-glycosylated EPO remained.

### Example 9

### Increased Resistance to Proteolysis of De-Glycosylated EPO Polypeptides Containing Modifications at Masked Positions

[0706] LEAD or Super-LEAD EPO polypeptides that were de-glycosylated by modification of all three glycosylation sites to histidine (H), i.e. N24H/N38H/N83H (referred to herein as NH3), were generated. A fully glycosylated native EPO polypeptide also was produced by production of the native EPO in CHO cells as described in Example 2. A fully non-glycosylated EPO polypeptide was generated by de-glycosylation of a glycosylated EPO protein (European pharmacopeia (EP) reference standard; E1515000, Batch 3.0). De-glycosylation was effected using the GlycoPro Enzymatic Deglycosylation Kit (Prozyme, GK80110) according to the manufacturer's instructions. Briefly, 1×10⁷ pg/ml of EPO was incubated overnight at 37° C. with 1× incubation buffer containing N-glycanase PNGase F, Sialidase A, O-Glycanase, Galactosidase b (1-4) and b-N-Acetyl Glucosaminidase.

[0707] To evaluate the resistance to proteolysis of the EPO mutants and control polypeptides (fully glycosylated native EPO, and fully de-glycosylated EPO), enzymatic cleavage at 37° C. over a period of time was performed as described in Example 5. A mixture of proteases was prepared by mixing 400 μl of FCS free RPMI medium with a 1.5% protease mixture (wt/wt) containing α-chymotrypsin, Endoproteinase AspN, Endoproteinase GluC and trypsin (Sigma). Proteolytic degradation kinetic was initiated by adding the protease mixture solution to each EPO polypeptide in DMEM medium supplemented with 1% FCS(CHOK1 culture medium). The EPO polypeptides were incubated with the proteases at 37° C. An aliquot was taken from each sample at the different kinetic time points and mixed with an anti-protease preparation (mini EDTA free, Roche—one tablet was dissolved in 10 ml of RPMI supplemented with 10% FCS) to stop proteolysis. The samples were frozen at −80° C. before the remaining concentration of EPO in each sample was determined using a Quantikine IVD human EPO ELISA kit (R&D Systems, UK). The percentage of the original concentration prior to proteolysis was then determined.

[0708] The protease resistance of triple de-glycosylated EPO LEAD or Super-LEAD polypeptides was compared to a full glycosylated native EPO polypeptide and to a non-glycosylated EPO polypeptide. The results are depicted in Tables 27 and 28 below.

TABLE 27
Resistance to proteolysis of EPO mutants (non glycosylated
mutants) in comparison to full glycosylated native EPO
(“lower to full glycosylated” means “lower
compared to full glycosylated”)

| | | | Proteolysis |
|---|---|---|---|
| | | | resistance |
| | | | (compared to |
| Nemo | Mutations | | fully |
| Code | (NH3 +) | Production | glycosylated) |
| 529 | R4H | | Lower |
| 564 | R139H | | Lower |
| 566 | R139H/R4H | | Lower |
| 612 | L93I | | Lower |
| 613 | E159N | | Lower |
| 614 | K52N | | Lower |
| 615 | L153V | | Lower |
| 653 | R139H/K20Q | | Lower |
| 654 | R139H/K52N | | Lower |
| 655 | R139H/L153V | | Lower |
| 656 | R139H/E159N | | Lower |
| 658 | K20Q/R139H/R4H | | No change |
| 659 | K20Q/R139H/K52N | | No change |
| 660 | K20Q/R139H/L153V | | Increase+ |
| 661 | K20Q/R139H/E159N | | No change |
| 662 | K20Q/R139H/L93I | | No change |
| 663 | L80I/R139H/R4H | | Lower |
| 664 | L80I/R139H/L93I | | Lower |
| 665 | K20Q/R139H/L80I | | No change |
| 666 | L80I/R139H/E159N | | Lower |
| 667 | L80I/R139H/K52N | | Lower |
| 668 | L80I/R139H/L153V | | Lower |
| 669 | L93V/R139H/R4H | | Lower |
| 670 | K20Q/R139H/L93V | | No change |
| 671 | L93V/R139H/E159N | | Lower |
| 672 | L93V/R139H/K52N | | Lower |
| 673 | L93V/R139H/L153V | | Lower |
| 674 | R4H/K20Q/L93I/R139H | | Increase+ |
| 675 | K20Q/L93I/R139H/E159N | | Increase+ |
| 676 | K20Q/L93I/R139H/K52N | | No change |
| 677 | K20Q/L93I/R139H/L153V | | No change |
| 678 | R4H/K20Q/L80I/R139H | | Increase+ |
| 679 | K20Q/L80I/R139H/L93I | | No change |
| 680 | K20Q/L80I/R139H/E159N | | Increase++ |
| 683 | K20Q/K52N/80I/R139H | Not | Not tested |
| | | produced | |
| 684 | K20Q/L80I/R139H/L153V | | Increase+ |
| 685 | K20Q/L93V/R139H/R4H | | Lower |
| 686 | K20Q/L93V/R139H/E159N | | Increase+ |
| 687 | K20Q/L93V/R139H/K52N | | Lower |
| 688 | K20Q/L93V/R139H/L153V | | Lower |
| 691 | R139H/L80I | | Lower |
| 692 | R139H/L93V | | Lower |
| 693 | R139H/L93I | | Lower |
| 695 | K20Q | | Lower |
| 698 | L93I/R139H/E159N | | Lower |
| 699 | L93I/R139H/K52N | | Lower |
| 700 | L93I/R139H/L153V | | Lower |
| 701 | L93I/R139H/R4H | | Lower |
| 702 | K20Q/L93I | | Lower |
| 703 | K20Q/L153V | | Lower |
| 704 | K20Q/E159N | | Lower |
| 705 | K20Q/R4H | | Lower |
| 707 | K20Q/K52N | | Lower |
| 721 | K20Q/L80I/R139H/E159N/R4H | | Increase++ |
| 722 | K20Q/L80I/R139H/E159N/K52N | | Increase+++ |
| 723 | K20Q/L80I/R139H/L153V/E159N | Not | Not tested |
| | | produced | |
| 724 | K20Q/L80I/R139H/E159N/L93I | | Increase+ |
| 725 | K20Q/L80I/R139H/L153V/R4H | | Increase++ |
| 726 | K20Q/K52N/L80I/R139H/L153V | Not | Not tested |
| | | produced | |
| 727 | K20Q/L80I/R139H/L153V/L93I | | Increase+ |
| 728 | K20Q/R139H/E159N/R4H | | Increase+ |
| 729 | K20Q/R139H/E159N/K52N | | Increase++ |
| 730 | K20Q/R139H/E159N/L153V | | Increase+++ |
| 731 | K20Q/L93I/R139H/E159N/R4H | | Increase++ |
| 732 | K20Q/L93I/R139H/E159N/K52N | | Increase++++ |
| 733 | K20Q/L93I/R139H/E159N/L153V | | Increase++ |
| 738 | R4H/K20Q/K52N/L80I/R139H | Not | Not tested |
| | | produced | |
| 739 | R4H/K20Q/L80I/R139H/L93I | | Increase+ |
| 740 | K20Q/R139H/L153V/R4H | | Increase+ |
| 741 | K20Q/R139H/K52N/L153V | | No change |
| 743 | R4H/K20Q/L93I/R139H/K52N | | Increase+ |
| 744 | R4H/K20Q/L93I/R139H/L153V | | Increase+ |
| 745 | K20Q/L93V/R139H/E159N/R4H | | Increase+ |
| 747 | K20Q/L93V/R139H/E159N/K52N | | Increase+++ |
| 749 | L80I | | Lower |
| 751 | L93V | | Lower |
| 753 | K20Q/L80I | | Lower |
| 755 | K20Q/L93V | | Lower |
| 761 | K20Q/R139H/R4H/K52N | | No change |

TABLE 28
Resistance to proteolysis of EPO mutants (non glycosylated
mutants) in comparison to non glycosylated native EPO

| | | | Proteolysis |
|---|---|---|---|
| | | | resistance |
| | | | (compared |
| | | | to non- |
| Nemo | Mutations | | glycosylated |
| Code | (NH3 +) | Production | native EPO) |
| 529 | R4H | | No change |
| 564 | R139H | | Increase++ |
| 566 | R139H/R4H | | Increase++ |
| 612 | L93I | | No change |
| 613 | E159N | | No change |
| 614 | K52N | | No change |
| 615 | L153V | | No change |
| 653 | R139H/K20Q | | Increase+++ |
| 654 | R139H/K52N | | Increase+++ |
| 655 | R139H/L153V | | Increase++ |
| 656 | R139H/E159N | | Increase++ |
| 658 | K20Q/R139H/R4H | | Increase+++ |
| 659 | K20Q/R139H/K52N | | Increase++ |
| 660 | K20Q/R139H/L153V | | Increase++++ |
| 661 | K20Q/R139H/E159N | | Increase+++ |
| 662 | K20Q/R139H/L93I | | Increase+++ |
| 663 | L80I/R139H/R4H | | Increase++ |
| 664 | L80I/R139H/L93I | | Increase++ |
| 665 | K20Q/R139H/L80I | | Increase+++ |
| 666 | L80I/R139H/E159N | | Increase+++ |
| 667 | L80I/R139H/K52N | | Increase+++ |
| 668 | L80I/R139H/L153V | | Increase+++ |
| 669 | L93V/R139H/R4H | | Increase++ |
| 670 | K20Q/R139H/L93V | | Increase+++ |
| 671 | L93V/R139H/E159N | | Increase++ |
| 672 | L93V/R139H/K52N | | Increase++ |
| 673 | L93V/R139H/L153V | | Increase++ |
| 674 | R4H/K20Q/L93I/139H | | Increase++++ |
| 675 | K20Q/L93I/R139H/E159N | | Increase++++ |
| 676 | K20Q/L93I/R139H/K52N | | Increase+++ |
| 677 | K20Q/L93I/R139H/L153V | | Increase++ |
| 678 | R4H/K20Q/L80I/R139H | | Increase++++ |
| 679 | K20Q/L80I/R139H/L93I | | Increase+++ |
| 680 | K20Q/L80I/R139H/E159N | | Increase+++++ |
| 683 | K20Q/K52N/80I/R139H | Not | Not tested |
| | | produced | |
| 684 | K20Q/L80I/R139H/L153V | | Increase++++ |
| 685 | K20Q/L93V/R139H/R4H | | Increase++ |
| 686 | K20Q/L93V/R139H/E159N | | Increase+++ |
| 687 | K20Q/L93V/R139H/K52N | | Increase+ |
| 688 | K20Q/L93V/R139H/L153V | | Increase++ |
| 691 | R139H/L80I | | Increase+ |
| 692 | R139H/L93V | | Increase+ |
| 693 | R139H/L93I | | Increase+ |
| 695 | K20Q | | No change |
| 698 | L93I/R139H/E159N | | Increase++ |
| 699 | L93I/R139H/K52N | | Increase++ |
| 700 | L93I/R139H/L153V | | Increase++ |
| 701 | L93I/R139H/R4H | | Increase++ |
| 702 | K20Q/L93I | | No change |
| 703 | K20Q/L153V | | No change |
| 704 | K20Q/E159N | | No change |
| 705 | K20Q/R4H | | No change |
| 707 | K20Q/K52N | | No change |
| 721 | K20Q/L80I/R139H/E159N/R4H | | Increase+++++ |
| 722 | K20Q/L80I/R139H/E159N/ | | Increase++++++ |
| | K52N | | |
| 723 | K20Q/L80I/R139H/L153V/ | Not | Not tested |
| | E159N | produced | |
| 724 | K20Q/L80I/R139H/E159N/L93I | | Increase++++ |
| 725 | K20Q/L80I/R139H/L153V/R4H | | Increase+++++ |
| 726 | K20Q/K52N/L80I/R139H/ | Not | Not tested |
| | L153V | produced | |
| 727 | K20Q/L80I/R139H/L153V/L93I | | Increase++++ |
| 728 | K20Q/R139H/E159N/R4H | | Increase+++ |
| 729 | K20Q/R139H/E159N/K52N | | Increase++++++ |
| 730 | K20Q/R139H/E159N/L153V | | Increase+++++ |
| 731 | K20Q/L93I/R139H/E159N/R4H | | Increase+++++ |
| 732 | K20Q/L93I/R139H/E159N/ | | Increase+++++++ |
| | K52N | | |
| 733 | K20Q/L93I/R139H/E159N/ | | Increase++++++ |
| | L153V | | |
| 738 | R4H/K20Q/K52N/L80I/R139H | Not | Not tested |
| | | produced | |
| 739 | R4H/K20Q/L80I/R139H/L93I | | Increase+++++ |
| 740 | K20Q/R139H/L153V/R4H | | Increase++++ |
| 741 | K20Q/R139H/K52N/L153V | | Increase++ |
| 743 | R4H/K20Q/L93I/R139H/K52N | | Increase+++++ |
| 744 | R4H/K20Q/L93I/R139H/L153V | | Increase+++++ |
| 745 | K20Q/L93V/R139H/E159N/ | | Increase+++++ |
| | R4H | | |
| 747 | K20Q/L93V/R139H/E159N/ | | Increase++++++ |
| | K52N | | |
| 749 | L80I | | No change |
| 751 | L93V | | No change |
| 753 | K20Q/L80I | | No change |
| 755 | K20Q/L93V | | No change |
| 761 | K20Q/R139H/R4H/K52N | | Increase++ |

[0709] Since modifications will be apparent to those of skill in this art, it is intended that this invention be limited only by the scope of the appended claims.

1. A modified erythropoietin (EPO) polypeptide, comprising:
one or more amino acid modifications at masked is-Hit residues masked by different glycosylation sites selected from among amino acid modifications R14H, R14Q, L16I, L16V, L17I, L17V, E18Q, E18H, E18N, K200, K20T, K20N, E21Q, E21H, E21N, E23Q, E23H, E31Q, E31H, L35V, L35I, E37Q, E37H, P42S, P42A, D43Q, D43H, E62Q, E62H, W64S, W64H, L67I, L67V, L69V, L69I, L70I, L70V, E72Q, E72H, L75V, L75I, R76H, R76Q, L80V, L80I, L81I, L81V, P87S, P87A, W88S, W88H, E89Q, E89H, P90S, P90A, L91I, L91V, L93V, L93I, D96Q, D96H, K97Q, K97T, P121S, P121A, P122S, P122A, D123H, D123N, P129S, P129A, L130V, L130I, R131H, R131Q, D136Q, D136H, D136N, F138I, F138V, R139H, R139Q, K140N, K140Q, L141I, L141V, F142I, F142V, R143H, R143Q, Y145H and Y1451 corresponding to residues in an unmodified EPO polypeptide having the sequence of amino acids set forth in SEQ ID NO: 2 or SEQ ID NO: 237; and
one or more additional amino acid modification(s) at an un-masked is-Hit residue selected from among amino acid modifications P2A, P3S, P3A, R4H, R4Q, L5I, L5V, C7S, C7V, C7A, C7I, C7T, D8Q, D8H, D8N, R10H, R10Q, L12V, L12I, E13Q, E13H, E13N, Y15H, Y151, C29S, C29V, C29A, C29I, C29T, K45Q, K45T, K45N, F48I, F48V, Y49H, Y49I, W51S, W51H, K52Q, K52T, K52N, R53H, R53Q, M54V, M54I, E55Q, E55H, E55N, E62N, L102V, L102I, R103H, R103Q, L105I, L105V, L108I, L108V, L109I, L109V, R110H, R1100, L112V, L112I, K116Q, K116T, K116N, E117Q, E117H, E117N, D123Q, F148I, F148V, L1491, L149V, R150H, R150Q, K152Q, K152T, K152N, L153I, L153V, K154Q, K154T, K154N, L155V, L155I, Y156H, Y156I, E159Q, E159H, E159N, R162H, R162Q, D165Q, D165H, D165N, R166H, and R166Q corresponding to residues in an unmodified EPO polypeptide having the sequence of amino acids set forth in SEQ ID NO: 2 or SEQ ID NO: 237.

2. The modified EPO polypeptide of claim 1, wherein the modifications are selected from among K20Q/R139H/R4H; K20Q/R139H/K52N; K20Q/R139H/E159N; L80I/R139H/R4H; L80I/R139H/E159N; L80I/R139H/K52N; L80I/R139H/L153V; L93V/R139H/R4H; L93V/R139H/E159N; L93V/R139H/K52N; L93V/R139H/L153V; R4H/K20Q/L93I/R139H; K20Q/L93I/R139H/K52N; K20Q/L93I/R139H/L153V; K20Q/K52N/L80I/R139H; K20Q/L93V/R139H/R4H; K20Q/L93V/R139H/E159N; K20Q/L93V/R139H/K52N; K20Q/L93V/R139H/L153V; L93I/R139H/E159N; L93I/R139H/K52N; L93I/R139H/L153V; L93I/R139H/R4H; K20Q/L80I/R139H/E159N/R4H; K20Q/L80I/R139H/E159N/K52N; K20Q/L80I/R139H/L153V/E159N; K20Q/L80I/R139H/E159N/L93I; K20Q/L80I/R139H/L153V/R4H; K20Q/K52N/L80I/R139H/L153V; K20Q/L80I/R139H/L153V/L93I; K20Q/R139H/E159N/R4H; K20Q/R139H/E159N; K20Q/R139H/E159N/L153V; K20Q/L93I/R139H/E159N/R4H; K20Q/L93I/R139H/E159N/K52N; K20Q/L93I/R139H/E159N/L153V; R4H/K20Q/K52N/L80I/R139H; R4H/K20Q/L80I/R139H/L93I; K20Q/R139H/L153V/R4H; K20Q/R139H/K52N/L153V; R4H/K20Q/L93I/R139H/K52N; R4H/K20Q/L93I/R139H/L153V; K20Q/L93V/R139H/E159N/R4H; K20Q/L93V/R139H/E159N/K52N; K20Q/R139H/R4H/K52N; and K20Q/R139H/E159N/K52N.

3. (canceled)

4. A modified erythropoietin (EPO) polypeptide, comprising amino acid modifications in an unmodified EPO polypeptide selected from among L80I/R139H/L93I; K20Q/L80I/R139H/L93I; K20Q/L93I; K20Q/L153V; K20Q/E159N; K20Q/R4H; K20Q/K52N; K20Q/L80I; K20Q/L93V; R4H/R150H; R4H/R143H; R4H/E159N; R4H/R139Q; R4H/L93I; R4H/D96Q; R4H/L130I, R4H/L153V; R4H/K20Q; R4H/F48I; R4H/R131Q; R4H/K45N; R4H/K52N; R4H/K52Q; R4H/L80I; R4H/K116T; R4H/D123N; R4H/D136N; R4H/P90S; R4H/D165Q; R4H/D165H; R4H/D165N; R4H/K116N; R4H/R143H; R4H/R166H; R4H/L16I; R4H/L16V; R4H/L93I/R143Q; R4H/L93I/R150H; R4H/R143Q/R150H; and R4H/L93I/E159N.

5. The modified EPO polypeptide of claim 1, wherein the polypeptide is glycosylated, partially glycosylated or de-glycosylated.

6. The modified EPO polypeptide of claim 1, wherein the polypeptide is partially glycosylated or is de-glycosylated by virtue of one or more further amino modifications at one or more of glycosylation sites N24, N38, N83, or S126, wherein the modification eliminates the glycosylation at the site.

7. The modified EPO polypeptide of claim 6, wherein the modifications are amino acid replacements selected from among N24H, N38H, N83H, N24K, N38K and N83K.

8. (canceled)

9. A modified erythropoietin (EPO) polypeptide, comprising two or more modifications in an EPO polypeptide, wherein at least one modification is R4H corresponding to amino acid residue set forth in SEQ ID NO:2 or SEQ ID NO:237.

10. The modified EPO polypeptide of claim 9, wherein the one or more additional amino acid modifications are selected from among P2S, P2A, P3S, P3A, R4Q, L5I, L5V, C7S, C7V, C7A, C71, C7T, D8Q, D8H, D8N, R10H, R10Q, L12V, L12I, E13Q, E13H, E13N, R14H, R14Q, Y15H, Y151, L16I, L16V, L17I, L17V, E18Q, E18H, E18N, K20Q, K20T, K20N, E21Q, E21H, E21N, E23Q, E23H, E23N, C29S, C29V, C29A, C291, C29T, E31Q, E31H, E31N, L35V, L351, E37Q, E37H, E37N, P42S, P42A, D43H, K45T, W51S, W51H, K52T, M54V, M54I, E62Q, E62H, E62N, W64S, W64H, L67I, L67V, L69V, L69I, L701, L70V, L80V, L80I, L811, L81V, P87S, P87A, W88S, W88H, E89Q, E89H, E89N, P90S, P90A, L91I, L91V, L93V, L93I, D96Q, D96H, D96N, K97Q, K97T, K97N, L102V, L102I, R103H, R103Q, L105I, L105V, L108I, L108V, L109I, L109V, R110H, R110Q, L112V, L112I, K116Q, K116T, K116N, E117Q, E117H, E117N, D123H, D136Q, D136H, D136N, F138I, F138V, R139H, R139Q, K140N, K140Q, L141I, L141V, F142I, F142V, R143H, R143Q, Y145H, Y145I, F148I, F148V, L1491, L149V, R150H, R150Q, K152Q, K152T, K152N, L153I, L153V, K154Q, K154T, K154N, L155V, L155I, Y156H, Y156I, E159Q, E159H, E159N, D165H, R166H, R166Q; F48I, K52Q, L130I, R131H, R131Q, D123N, K45N, K52N, D165Q, D165N and R166H.

11-13. (canceled)

14. The modified EPO polypeptide of claim 1, wherein the unmodified EPO polypeptide is 160, 161, 162, 163, 164, 165 or 166 amino acids in length.

15. The modified EPO polypeptide of claim 1, wherein the unmodified EPO polypeptide comprises the sequence of amino acids set forth in SEQ ID NO: 2 or 237, or a variant that has at least or at least about 60%, 70%, 75%, 80%, 85%, 90%, 95%, 96%, 97%, 98%, 99% or more sequence identity with the polypeptide having the sequence set forth in SEQ ID NO: 2 or 237.

16. The modified EPO polypeptide of claim 1, wherein the unmodified EPO polypeptide comprises the sequence of amino acids set forth in SEQ ID NO: 2 or 237.

17. (canceled)

18. The modified EPO polypeptide of claim 1, wherein the polypeptide is further modified and the modification is one or more of modifications that contributes to altered immunogenicity, carboxylation, hydroxylation, hasylation, carbamylation, sulfation, phosphorylation, albumination, oxidation, PEGylation or modifications that contribute to protease resistance of the polypeptide.

19. A nucleic acid molecule encoding a modified EPO polypeptide of claim 1.

20. A vector, comprising a nucleic acid molecule of claim 19.

21. A cell, comprising the nucleic acid molecule of claim 19.

22. (canceled)

23. (canceled)

24. A pharmaceutical composition, comprising a modified EPO polypeptide of claim 1.

25. The pharmaceutical composition of claim 24, wherein the composition is in the form of a liquid, a solution, a suspension, an aerosol, a tablet, a lozenge or a capsule.

26. (canceled)

27. (canceled)

28. The pharmaceutical composition of claim 24 that is formulated for oral, parenteral, intravenous, intradermal, subcutaneous, buccal, inhalation, intramuscular, rectal or topical administration.

29. The pharmaceutical composition of claim 28 that is formulated for oral administration.

30. (canceled)

31. A method of treatment, comprising administering the pharmaceutical composition of claim 24, wherein the disease or disorder treated is amenable to treatment by erythropoietin (EPO).

32. The method of treatment of claim 31, wherein the pharmaceutical composition is administered orally.

33. The method of treatment of claim 31, wherein the disease or disorder is selected from among anemias that accompany renal failure, AIDS, malignancy and chronic inflammation; perioperative surgeries; iron overload disorder; abnormal hemostasis; tissue protective therapy; neurological condition; and autologous blood donation.

34. The method of claim 33, wherein the anemia is selected from among thalassemia, sickle cell anemia, the anemia of prematurity, anemia that accompanies cis-platinum chemotherapy, and anemia following intensive radiotherapy and/or chemotherapy plus bone marrow transplantation.

35-73. (canceled)

The application's sequence listing, which the Patent Office published only in electronic form, follows.

SEQUENCE LISTING (491 sequences)

SEQ ID NO: 1 - protein, 193 aa, Homo sapiens
  human EPO - immature protein
MGVHECPAWLWLLLSLLSLPLGLPVLGAPPRLICDSRVLERYLLEAKEAENITTGCAEHCSLNENITVPDTKVNFYAWKRMEVGQQAVEVWQGLALLSEAVLRGQALLVNSSQPWEPLQLHVDKAVSGLRSLTTLLRALGAQKEAISPPDAASAAPLRTITADTFRKLFRVYSNFLRGKLKLYTGEACRTGDR

SEQ ID NO: 2 - protein, 166 aa, Homo sapiens
  Human EPO - mature protein
APPRLICDSRVLERYLLEAKEAENITTGCAEHCSLNENITVPDTKVNFYAWKRMEVGQQAVEVWQGLALLSEAVLRGQALLVNSSQPWEPLQLHVDKAVSGLRSLTTLLRALGAQKEAISPPDAASAAPLRTITADTFRKLFRVYSNFLRGKLKLYTGEACRTGDR

SEQ ID NO: 3 - protein, 166 aa, Artificial Sequence
  EPO_1_P2S
ASPRLICDSRVLERYLLEAKEAENITTGCAEHCSLNENITVPDTKVNFYAWKRMEVGQQAVEVWQGLALLSEAVLRGQALLVNSSQPWEPLQLHVDKAVSGLRSLTTLLRALGAQKEAISPPDAASAAPLRTITADTFRKLFRVYSNFLRGKLKLYTGEACRTGDR

SEQ ID NO: 4 - protein, 166 aa, Artificial Sequence
  EPO_2_P2A
AAPRLICDSRVLERYLLEAKEAENITTGCAEHCSLNENITVPDTKVNFYAWKRMEVGQQAVEVWQGLALLSEAVLRGQALLVNSSQPWEPLQLHVDKAVSGLRSLTTLLRALGAQKEAISPPDAASAAPLRTITADTFRKLFRVYSNFLRGKLKLYTGEACRTGDR

SEQ ID NO: 5 - protein, 166 aa, Artificial Sequence
  EPO_3_P3S
APSRLICDSRVLERYLLEAKEAENITTGCAEHCSLNENITVPDTKVNFYAWKRMEVGQQAVEVWQGLALLSEAVLRGQALLVNSSQPWEPLQLHVDKAVSGLRSLTTLLRALGAQKEAISPPDAASAAPLRTITADTFRKLFRVYSNFLRGKLKLYTGEACRTGDR

SEQ ID NO: 6 - protein, 166 aa, Artificial Sequence
  EPO_4_P3A
APARLICDSRVLERYLLEAKEAENITTGCAEHCSLNENITVPDTKVNFYAWKRMEVGQQAVEVWQGLALLSEAVLRGQALLVNSSQPWEPLQLHVDKAVSGLRSLTTLLRALGAQKEAISPPDAASAAPLRTITADTFRKLFRVYSNFLRGKLKLYTGEACRTGDR

SEQ ID NO: 7 - protein, 166 aa, Artificial Sequence
  EPO_5_R4H
APPHLICDSRVLERYLLEAKEAENITTGCAEHCSLNENITVPDTKVNFYAWKRMEVGQQAVEVWQGLALLSEAVLRGQALLVNSSQPWEPLQLHVDKAVSGLRSLTTLLRALGAQKEAISPPDAASAAPLRTITADTFRKLFRVYSNFLRGKLKLYTGEACRTGDR

SEQ ID NO: 8 - protein, 166 aa, Artificial Sequence
  EPO_6_R4Q
APPQLICDSRVLERYLLEAKEAENITTGCAEHCSLNENITVPDTKVNFYAWKRMEVGQQAVEVWQGLALLSEAVLRGQALLVNSSQPWEPLQLHVDKAVSGLRSLTTLLRALGAQKEAISPPDAASAAPLRTITADTFRKLFRVYSNFLRGKLKLYTGEACRTGDR

SEQ ID NO: 9 - protein, 166 aa, Artificial Sequence
  EPO_7_C7S
APPRLISDSRVLERYLLEAKEAENITTGCAEHCSLNENITVPDTKVNFYAWKRMEVGQQAVEVWQGLALLSEAVLRGQALLVNSSQPWEPLQLHVDKAVSGLRSLTTLLRALGAQKEAISPPDAASAAPLRTITADTFRKLFRVYSNFLRGKLKLYTGEACRTGDR

SEQ ID NO: 10 - protein, 166 aa, Artificial Sequence
  EPO_8_C7V
APPRLIVDSRVLERYLLEAKEAENITTGCAEHCSLNENITVPDTKVNFYAWKRMEVGQQAVEVWQGLALLSEAVLRGQALLVNSSQPWEPLQLHVDKAVSGLRSLTTLLRALGAQKEAISPPDAASAAPLRTITADTFRKLFRVYSNFLRGKLKLYTGEACRTGDR

SEQ ID NO: 11 - protein, 166 aa, Artificial Sequence
  EPO_9_D8Q
APPRLICQSRVLERYLLEAKEAENITTGCAEHCSLNENITVPDTKVNFYAWKRMEVGQQAVEVWQGLALLSEAVLRGQALLVNSSQPWEPLQLHVDKAVSGLRSLTTLLRALGAQKEAISPPDAASAAPLRTITADTFRKLFRVYSNFLRGKLKLYTGEACRTGDR

SEQ ID NO: 12 - protein, 166 aa, Artificial Sequence
  EPO_10_D8H
APPRLICHSRVLERYLLEAKEAENITTGCAEHCSLNENITVPDTKVNFYAWKRMEVGQQAVEVWQGLALLSEAVLRGQALLVNSSQPWEPLQLHVDKAVSGLRSLTTLLRALGAQKEAISPPDAASAAPLRTITADTFRKLFRVYSNFLRGKLKLYTGEACRTGDR

SEQ ID NO: 13 - protein, 166 aa, Artificial Sequence
  EPO_11_R10H
APPRLICDSHVLERYLLEAKEAENITTGCAEHCSLNENITVPDTKVNFYAWKRMEVGQQAVEVWQGLALLSEAVLRGQALLVNSSQPWEPLQLHVDKAVSGLRSLTTLLRALGAQKEAISPPDAASAAPLRTITADTFRKLFRVYSNFLRGKLKLYTGEACRTGDR

SEQ ID NO: 14 - protein, 166 aa, Artificial Sequence
  EPO_12_R10Q
APPRLICDSQVLERYLLEAKEAENITTGCAEHCSLNENITVPDTKVNFYAWKRMEVGQQAVEVWQGLALLSEAVLRGQALLVNSSQPWEPLQLHVDKAVSGLRSLTTLLRALGAQKEAISPPDAASAAPLRTITADTFRKLFRVYSNFLRGKLKLYTGEACRTGDR

SEQ ID NO: 15 - protein, 166 aa, Artificial Sequence
  EPO_13_L12V
APPRLICDSRVVERYLLEAKEAENITTGCAEHCSLNENITVPDTKVNFYAWKRMEVGQQAVEVWQGLALLSEAVLRGQALLVNSSQPWEPLQLHVDKAVSGLRSLTTLLRALGAQKEAISPPDAASAAPLRTITADTFRKLFRVYSNFLRGKLKLYTGEACRTGDR

SEQ ID NO: 16 - protein, 166 aa, Artificial Sequence
  EPO_14_L12I
APPRLICDSRVIERYLLEAKEAENITTGCAEHCSLNENITVPDTKVNFYAWKRMEVGQQAVEVWQGLALLSEAVLRGQALLVNSSQPWEPLQLHVDKAVSGLRSLTTLLRALGAQKEAISPPDAASAAPLRTITADTFRKLFRVYSNFLRGKLKLYTGEACRTGDR

SEQ ID NO: 17 - protein, 166 aa, Artificial Sequence
  EPO_15_E18Q
APPRLICDSRVLERYLLQAKEAENITTGCAEHCSLNENITVPDTKVNFYAWKRMEVGQQAVEVWQGLALLSEAVLRGQALLVNSSQPWEPLQLHVDKAVSGLRSLTTLLRALGAQKEAISPPDAASAAPLRTITADTFRKLFRVYSNFLRGKLKLYTGEACRTGDR

SEQ ID NO: 18 - protein, 166 aa, Artificial Sequence
  EPO_16_E18H
APPRLICDSRVLERYLLHAKEAENITTGCAEHCSLNENITVPDTKVNFYAWKRMEVGQQAVEVWQGLALLSEAVLRGQALLVNSSQPWEPLQLHVDKAVSGLRSLTTLLRALGAQKEAISPPDAASAAPLRTITADTFRKLFRVYSNFLRGKLKLYTGEACRTGDR

SEQ ID NO: 19 - protein, 166 aa, Artificial Sequence
  EPO_17_K20Q
APPRLICDSRVLERYLLEAQEAENITTGCAEHCSLNENITVPDTKVNFYAWKRMEVGQQAVEVWQGLALLSEAVLRGQALLVNSSQPWEPLQLHVDKAVSGLRSLTTLLRALGAQKEAISPPDAASAAPLRTITADTFRKLFRVYSNFLRGKLKLYTGEACRTGDR

SEQ ID NO: 20 - protein, 166 aa, Artificial Sequence
  EPO_18_K20T
APPRLICDSRVLERYLLEATEAENITTGCAEHCSLNENITVPDTKVNFYAWKRMEVGQQAVEVWQGLALLSEAVLRGQALLVNSSQPWEPLQLHVDKAVSGLRSLTTLLRALGAQKEAISPPDAASAAPLRTITADTFRKLFRVYSNFLRGKLKLYTGEACRTGDR

SEQ ID NO: 21 - protein, 166 aa, Artificial Sequence
  EPO_19_E21Q
APPRLICDSRVLERYLLEAKQAENITTGCAEHCSLNENITVPDTKVNFYAWKRMEVGQQAVEVWQGLALLSEAVLRGQALLVNSSQPWEPLQLHVDKAVSGLRSLTTLLRALGAQKEAISPPDAASAAPLRTITADTFRKLFRVYSNFLRGKLKLYTGEACRTGDR

SEQ ID NO: 22 - protein, 166 aa, Artificial Sequence
  EPO_20_E21H
APPRLICDSRVLERYLLEAKHAENITTGCAEHCSLNENITVPDTKVNFYAWKRMEVGQQAVEVWQGLALLSEAVLRGQALLVNSSQPWEPLQLHVDKAVSGLRSLTTLLRALGAQKEAISPPDAASAAPLRTITADTFRKLFRVYSNFLRGKLKLYTGEACRTGDR

SEQ ID NO: 23 - protein, 166 aa, Artificial Sequence
  EPO_21_E23Q
APPRLICDSRVLERYLLEAKEAQNITTGCAEHCSLNENITVPDTKVNFYAWKRMEVGQQAVEVWQGLALLSEAVLRGQALLVNSSQPWEPLQLHVDKAVSGLRSLTTLLRALGAQKEAISPPDAASAAPLRTITADTFRKLFRVYSNFLRGKLKLYTGEACRTGDR

SEQ ID NO: 24 - protein, 166 aa, Artificial Sequence
  EPO_22_E23H
APPRLICDSRVLERYLLEAKEAHNITTGCAEHCSLNENITVPDTKVNFYAWKRMEVGQQAVEVWQGLALLSEAVLRGQALLVNSSQPWEPLQLHVDKAVSGLRSLTTLLRALGAQKEAISPPDAASAAPLRTITADTFRKLFRVYSNFLRGKLKLYTGEACRTGDR

SEQ ID NO: 25 - protein, 166 aa, Artificial Sequence
  EPO_23_C29S
APPRLICDSRVLERYLLEAKEAENITTGSAEHCSLNENITVPDTKVNFYAWKRMEVGQQAVEVWQGLALLSEAVLRGQALLVNSSQPWEPLQLHVDKAVSGLRSLTTLLRALGAQKEAISPPDAASAAPLRTITADTFRKLFRVYSNFLRGKLKLYTGEACRTGDR

SEQ ID NO: 26 - protein, 166 aa, Artificial Sequence
  EPO_24_C29V
APPRLICDSRVLERYLLEAKEAENITTGVAEHCSLNENITVPDTKVNFYAWKRMEVGQQAVEVWQGLALLSEAVLRGQALLVNSSQPWEPLQLHVDKAVSGLRSLTTLLRALGAQKEAISPPDAASAAPLRTITADTFRKLFRVYSNFLRGKLKLYTGEACRTGDR

SEQ ID NO: 27 - protein, 166 aa, Artificial Sequence
  EPO_25_E31Q
APPRLICDSRVLERYLLEAKEAENITTGCAQHCSLNENITVPDTKVNFYAWKRMEVGQQAVEVWQGLALLSEAVLRGQALLVNSSQPWEPLQLHVDKAVSGLRSLTTLLRALGAQKEAISPPDAASAAPLRTITADTFRKLFRVYSNFLRGKLKLYTGEACRTGDR

SEQ ID NO: 28 - protein, 166 aa, Artificial Sequence
  EPO_26_E31H
APPRLICDSRVLERYLLEAKEAENITTGCAHHCSLNENITVPDTKVNFYAWKRMEVGQQAVEVWQGLALLSEAVLRGQALLVNSSQPWEPLQLHVDKAVSGLRSLTTLLRALGAQKEAISPPDAASAAPLRTITADTFRKLFRVYSNFLRGKLKLYTGEACRTGDR

SEQ ID NO: 29 - protein, 166 aa, Artificial Sequence
  EPO_27_L35V
APPRLICDSRVLERYLLEAKEAENITTGCAEHCSVNENITVPDTKVNFYAWKRMEVGQQAVEVWQGLALLSEAVLRGQALLVNSSQPWEPLQLHVDKAVSGLRSLTTLLRALGAQKEAISPPDAASAAPLRTITADTFRKLFRVYSNFLRGKLKLYTGEACRTGDR

SEQ ID NO: 30 - protein, 166 aa, Artificial Sequence
  EPO_28_L35I
APPRLICDSRVLERYLLEAKEAENITTGCAEHCSINENITVPDTKVNFYAWKRMEVGQQAVEVWQGLALLSEAVLRGQALLVNSSQPWEPLQLHVDKAVSGLRSLTTLLRALGAQKEAISPPDAASAAPLRTITADTFRKLFRVYSNFLRGKLKLYTGEACRTGDR

SEQ ID NO: 31 - protein, 166 aa, Artificial Sequence
  EPO_29_E37Q
APPRLICDSRVLERYLLEAKEAENITTGCAEHCSLNQNITVPDTKVNFYAWKRMEVGQQAVEVWQGLALLSEAVLRGQALLVNSSQPWEPLQLHVDKAVSGLRSLTTLLRALGAQKEAISPPDAASAAPLRTITADTFRKLFRVYSNFLRGKLKLYTGEACRTGDR

SEQ ID NO: 32 - protein, 166 aa, Artificial Sequence
  EPO_30_E37H
APPRLICDSRVLERYLLEAKEAENITTGCAEHCSLNHNITVPDTKVNFYAWKRMEVGQQAVEVWQGLALLSEAVLRGQALLVNSSQPWEPLQLHVDKAVSGLRSLTTLLRALGAQKEAISPPDAASAAPLRTITADTFRKLFRVYSNFLRGKLKLYTGEACRTGDR

SEQ ID NO: 33 - protein, 166 aa, Artificial Sequence
  EPO_31_P42S
APPRLICDSRVLERYLLEAKEAENITTGCAEHCSLNENITVSDTKVNFYAWKRMEVGQQAVEVWQGLALLSEAVLRGQALLVNSSQPWEPLQLHVDKAVSGLRSLTTLLRALGAQKEAISPPDAASAAPLRTITADTFRKLFRVYSNFLRGKLKLYTGEACRTGDR

SEQ ID NO: 34 - protein, 166 aa, Artificial Sequence
  EPO_32_P42A
APPRLICDSRVLERYLLEAKEAENITTGCAEHCSLNENITVADTKVNFYAWKRMEVGQQAVEVWQGLALLSEAVLRGQALLVNSSQPWEPLQLHVDKAVSGLRSLTTLLRALGAQKEAISPPDAASAAPLRTITADTFRKLFRVYSNFLRGKLKLYTGEACRTGDR

SEQ ID NO: 35 - protein, 166 aa, Artificial Sequence
  EPO_33_D43Q
APPRLICDSRVLERYLLEAKEAENITTGCAEHCSLNENITVPQTKVNFYAWKRMEVGQQAVEVWQGLALLSEAVLRGQALLVNSSQPWEPLQLHVDKAVSGLRSLTTLLRALGAQKEAISPPDAASAAPLRTITADTFRKLFRVYSNFLRGKLKLYTGEACRTGDR

SEQ ID NO: 36 - protein, 166 aa, Artificial Sequence
  EPO_34_D43H
APPRLICDSRVLERYLLEAKEAENITTGCAEHCSLNENITVPHTKVNFYAWKRMEVGQQAVEVWQGLALLSEAVLRGQALLVNSSQPWEPLQLHVDKAVSGLRSLTTLLRALGAQKEAISPPDAASAAPLRTITADTFRKLFRVYSNFLRGKLKLYTGEACRTGDR

SEQ ID NO: 37 - protein, 166 aa, Artificial Sequence
  EPO_35_K45Q
APPRLICDSRVLERYLLEAKEAENITTGCAEHCSLNENITVPDTQVNFYAWKRMEVGQQAVEVWQGLALLSEAVLRGQALLVNSSQPWEPLQLHVDKAVSGLRSLTTLLRALGAQKEAISPPDAASAAPLRTITADTFRKLFRVYSNFLRGKLKLYTGEACRTGDR

SEQ ID NO: 38 - protein, 166 aa, Artificial Sequence
  EPO_36_K45T
APPRLICDSRVLERYLLEAKEAENITTGCAEHCSLNENITVPDTTVNFYAWKRMEVGQQAVEVWQGLALLSEAVLRGQALLVNSSQPWEPLQLHVDKAVSGLRSLTTLLRALGAQKEAISPPDAASAAPLRTITADTFRKLFRVYSNFLRGKLKLYTGEACRTGDR

SEQ ID NO: 39 - protein, 166 aa, Artificial Sequence
  EPO_37_F48I
APPRLICDSRVLERYLLEAKEAENITTGCAEHCSLNENITVPDTKVNIYAWKRMEVGQQAVEVWQGLALLSEAVLRGQALLVNSSQPWEPLQLHVDKAVSGLRSLTTLLRALGAQKEAISPPDAASAAPLRTITADTFRKLFRVYSNFLRGKLKLYTGEACRTGDR

SEQ ID NO: 40 - protein, 166 aa, Artificial Sequence
  EPO_38_F48V
APPRLICDSRVLERYLLEAKEAENITTGCAEHCSLNENITVPDTKVNVYAWKRMEVGQQAVEVWQGLALLSEAVLRGQALLVNSSQPWEPLQLHVDKAVSGLRSLTTLLRALGAQKEAISPPDAASAAPLRTITADTFRKLFRVYSNFLRGKLKLYTGEACRTGDR

SEQ ID NO: 41 - protein, 166 aa, Artificial Sequence
  EPO_39_Y49H
APPRLICDSRVLERYLLEAKEAENITTGCAEHCSLNENITVPDTKVNFHAWKRMEVGQQAVEVWQGLALLSEAVLRGQALLVNSSQPWEPLQLHVDKAVSGLRSLTTLLRALGAQKEAISPPDAASAAPLRTITADTFRKLFRVYSNFLRGKLKLYTGEACRTGDR

SEQ ID NO: 42 - protein, 166 aa, Artificial Sequence
  EPO_40_Y49I
APPRLICDSRVLERYLLEAKEAENITTGCAEHCSLNENITVPDTKVNFIAWKRMEVGQQAVEVWQGLALLSEAVLRGQALLVNSSQPWEPLQLHVDKAVSGLRSLTTLLRALGAQKEAISPPDAASAAPLRTITADTFRKLFRVYSNFLRGKLKLYTGEACRTGDR

SEQ ID NO: 43 - protein, 166 aa, Artificial Sequence
  EPO_41_W51S
APPRLICDSRVLERYLLEAKEAENITTGCAEHCSLNENITVPDTKVNFYASKRMEVGQQAVEVWQGLALLSEAVLRGQALLVNSSQPWEPLQLHVDKAVSGLRSLTTLLRALGAQKEAISPPDAASAAPLRTITADTFRKLFRVYSNFLRGKLKLYTGEACRTGDR

SEQ ID NO: 44 - protein, 166 aa, Artificial Sequence
  EPO_42_W51H
APPRLICDSRVLERYLLEAKEAENITTGCAEHCSLNENITVPDTKVNFYAHKRMEVGQQAVEVWQGLALLSEAVLRGQALLVNSSQPWEPLQLHVDKAVSGLRSLTTLLRALGAQKEAISPPDAASAAPLRTITADTFRKLFRVYSNFLRGKLKLYTGEACRTGDR

SEQ ID NO: 45 - protein, 166 aa, Artificial Sequence
  EPO_43_K52Q
APPRLICDSRVLERYLLEAKEAENITTGCAEHCSLNENITVPDTKVNFYAWQRMEVGQQAVEVWQGLALLSEAVLRGQALLVNSSQPWEPLQLHVDKAVSGLRSLTTLLRALGAQKEAISPPDAASAAPLRTITADTFRKLFRVYSNFLRGKLKLYTGEACRTGDR

SEQ ID NO: 46 - protein, 166 aa, Artificial Sequence
  EPO_44_K52T
APPRLICDSRVLERYLLEAKEAENITTGCAEHCSLNENITVPDTKVNFYAWTRMEVGQQAVEVWQGLALLSEAVLRGQALLVNSSQPWEPLQLHVDKAVSGLRSLTTLLRALGAQKEAISPPDAASAAPLRTITADTFRKLFRVYSNFLRGKLKLYTGEACRTGDR

SEQ ID NO: 47 - protein, 166 aa, Artificial Sequence
  EPO_45_R53H
APPRLICDSRVLERYLLEAKEAENITTGCAEHCSLNENITVPDTKVNFYAWKHMEVGQQAVEVWQGLALLSEAVLRGQALLVNSSQPWEPLQLHVDKAVSGLRSLTTLLRALGAQKEAISPPDAASAAPLRTITADTFRKLFRVYSNFLRGKLKLYTGEACRTGDR

SEQ ID NO: 48 - protein, 166 aa, Artificial Sequence
  EPO_46_R53Q
APPRLICDSRVLERYLLEAKEAENITTGCAEHCSLNENITVPDTKVNFYAWKQMEVGQQAVEVWQGLALLSEAVLRGQALLVNSSQPWEPLQLHVDKAVSGLRSLTTLLRALGAQKEAISPPDAASAAPLRTITADTFRKLFRVYSNFLRGKLKLYTGEACRTGDR

SEQ ID NO: 49 - protein, 166 aa, Artificial Sequence
  EPO_47_M54V
APPRLICDSRVLERYLLEAKEAENITTGCAEHCSLNENITVPDTKVNFYAWKRVEVGQQAVEVWQGLALLSEAVLRGQALLVNSSQPWEPLQLHVDKAVSGLRSLTTLLRALGAQKEAISPPDAASAAPLRTITADTFRKLFRVYSNFLRGKLKLYTGEACRTGDR

SEQ ID NO: 50 - protein, 166 aa, Artificial Sequence
  EPO_48_M54I
APPRLICDSRVLERYLLEAKEAENITTGCAEHCSLNENITVPDTKVNFYAWKRIEVGQQAVEVWQGLALLSEAVLRGQALLVNSSQPWEPLQLHVDKAVSGLRSLTTLLRALGAQKEAISPPDAASAAPLRTITADTFRKLFRVYSNFLRGKLKLYTGEACRTGDR

SEQ ID NO: 51 - protein, 166 aa, Artificial Sequence
  EPO_49_E55Q
APPRLICDSRVLERYLLEAKEAENITTGCAEHCSLNENITVPDTKVNFYAWKRMQVGQQAVEVWQGLALLSEAVLRGQALLVNSSQPWEPLQLHVDKAVSGLRSLTTLLRALGAQKEAISPPDAASAAPLRTITADTFRKLFRVYSNFLRGKLKLYTGEACRTGDR

SEQ ID NO: 52 - protein, 166 aa, Artificial Sequence
  EPO_50_E55H
APPRLICDSRVLERYLLEAKEAENITTGCAEHCSLNENITVPDTKVNFYAWKRMHVGQQAVEVWQGLALLSEAVLRGQALLVNSSQPWEPLQLHVDKAVSGLRSLTTLLRALGAQKEAISPPDAASAAPLRTITADTFRKLFRVYSNFLRGKLKLYTGEACRTGDR

SEQ ID NO: 53 - protein, 166 aa, Artificial Sequence
  EPO_51_E62Q
APPRLICDSRVLERYLLEAKEAENITTGCAEHCSLNENITVPDTKVNFYAWKRMEVGQQAVQVWQGLALLSEAVLRGQALLVNSSQPWEPLQLHVDKAVSGLRSLTTLLRALGAQKEAISPPDAASAAPLRTITADTFRKLFRVYSNFLRGKLKLYTGEACRTGDR

SEQ ID NO: 54 - protein, 166 aa, Artificial Sequence
  EPO_52_E62H
APPRLICDSRVLERYLLEAKEAENITTGCAEHCSLNENITVPDTKVNFYAWKRMEVGQQAVHVWQGLALLSEAVLRGQALLVNSSQPWEPLQLHVDKAVSGLRSLTTLLRALGAQKEAISPPDAASAAPLRTITADTFRKLFRVYSNFLRGKLKLYTGEACRTGDR

SEQ ID NO: 55 - protein, 166 aa, Artificial Sequence
  EPO_53_W64S
APPRLICDSRVLERYLLEAKEAENITTGCAEHCSLNENITVPDTKVNFYAWKRMEVGQQAVEVSQGLALLSEAVLRGQALLVNSSQPWEPLQLHVDKAVSGLRSLTTLLRALGAQKEAISPPDAASAAPLRTITADTFRKLFRVYSNFLRGKLKLYTGEACRTGDR

SEQ ID NO: 56 - protein, 166 aa, Artificial Sequence
  EPO_54_W64H
APPRLICDSRVLERYLLEAKEAENITTGCAEHCSLNENITVPDTKVNFYAWKRMEVGQQAVEVHQGLALLSEAVLRGQALLVNSSQPWEPLQLHVDKAVSGLRSLTTLLRALGAQKEAISPPDAASAAPLRTITADTFRKLFRVYSNFLRGKLKLYTGEACRTGDR

SEQ ID NO: 57 - protein, 166 aa, Artificial Sequence
  EPO_55_L69V
APPRLICDSRVLERYLLEAKEAENITTGCAEHCSLNENITVPDTKVNFYAWKRMEVGQQAVEVWQGLAVLSEAVLRGQALLVNSSQPWEPLQLHVDKAVSGLRSLTTLLRALGAQKEAISPPDAASAAPLRTITADTFRKLFRVYSNFLRGKLKLYTGEACRTGDR

SEQ ID NO: 58 - protein, 166 aa, Artificial Sequence
  EPO_56_L69I
APPRLICDSRVLERYLLEAKEAENITTGCAEHCSLNENITVPDTKVNFYAWKRMEVGQQAVEVWQGLAILSEAVLRGQALLVNSSQPWEPLQLHVDKAVSGLRSLTTLLRALGAQKEAISPPDAASAAPLRTITADTFRKLFRVYSNFLRGKLKLYTGEACRTGDR

SEQ ID NO: 59 - protein, 166 aa, Artificial Sequence
  EPO_57_E72Q
APPRLICDSRVLERYLLEAKEAENITTGCAEHCSLNENITVPDTKVNFYAWKRMEVGQQAVEVWQGLALLSQAVLRGQALLVNSSQPWEPLQLHVDKAVSGLRSLTTLLRALGAQKEAISPPDAASAAPLRTITADTFRKLFRVYSNFLRGKLKLYTGEACRTGDR

SEQ ID NO: 60 - protein, 166 aa, Artificial Sequence
  EPO_58_E72H
APPRLICDSRVLERYLLEAKEAENITTGCAEHCSLNENITVPDTKVNFYAWKRMEVGQQAVEVWQGLALLSHAVLRGQALLVNSSQPWEPLQLHVDKAVSGLRSLTTLLRALGAQKEAISPPDAASAAPLRTITADTFRKLFRVYSNFLRGKLKLYTGEACRTGDR

SEQ ID NO: 61 - protein, 166 aa, Artificial Sequence
  EPO_59_L75V
APPRLICDSRVLERYLLEAKEAENITTGCAEHCSLNENITVPDTKVNFYAWKRMEVGQQAVEVWQGLALLSEAVVRGQALLVNSSQPWEPLQLHVDKAVSGLRSLTTLLRALGAQKEAISPPDAASAAPLRTITADTFRKLFRVYSNFLRGKLKLYTGEACRTGDR

SEQ ID NO: 62 - protein, 166 aa, Artificial Sequence
  EPO_60_L75I
APPRLICDSRVLERYLLEAKEAENITTGCAEHCSLNENITVPDTKVNFYAWKRMEVGQQAVEVWQGLALLSEAVIRGQALLVNSSQPWEPLQLHVDKAVSGLRSLTTLLRALGAQKEAISPPDAASAAPLRTITADTFRKLFRVYSNFLRGKLKLYTGEACRTGDR

SEQ ID NO: 63 - protein, 166 aa, Artificial Sequence
  EPO_61_R76H
APPRLICDSRVLERYLLEAKEAENITTGCAEHCSLNENITVPDTKVNFYAWKRMEVGQQAVEVWQGLALLSEAVLHGQALLVNSSQPWEPLQLHVDKAVSGLRSLTTLLRALGAQKEAISPPDAASAAPLRTITADTFRKLFRVYSNFLRGKLKLYTGEACRTGDR

SEQ ID NO: 64 - protein, 166 aa, Artificial Sequence
  EPO_62_R76q
APPRLICDSRVLERYLLEAKEAENITTGCAEHCSLNENITVPDTKVNFYAWKRMEVGQQAVEVWQGLALLSEAVLQGQALLVNSSQPWEPLQLHVDKAVSGLRSLTTLLRALGAQKEAISPPDAASAAPLRTITADTFRKLFRVYSNFLRGKLKLYTGEACRTGDR

SEQ ID NO: 65 - protein, 166 aa, Artificial Sequence
  EPO_63_L80V
APPRLICDSRVLERYLLEAKEAENITTGCAEHCSLNENITVPDTKVNFYAWKRMEVGQQAVEVWQGLALLSEAVLRGQAVLVNSSQPWEPLQLHVDKAVSGLRSLTTLLRALGAQKEAISPPDAASAAPLRTITADTFRKLFRVYSNFLRGKLKLYTGEACRTGDR

SEQ ID NO: 66 - protein, 166 aa, Artificial Sequence
  EPO_64_L80I
APPRLICDSRVLERYLLEAKEAENITTGCAEHCSLNENITVPDTKVNFYAWKRMEVGQQAVEVWQGLALLSEAVLRGQAILVNSSQPWEPLQLHVDKAVSGLRSLTTLLRALGAQKEAISPPDAASAAPLRTITADTFRKLFRVYSNFLRGKLKLYTGEACRTGDR

SEQ ID NO: 67 - protein, 166 aa, Artificial Sequence
  EPO_65_P87S
APPRLICDSRVLERYLLEAKEAENITTGCAEHCSLNENITVPDTKVNFYAWKRMEVGQQAVEVWQGLALLSEAVLRGQALLVNSSQSWEPLQLHVDKAVSGLRSLTTLLRALGAQKEAISPPDAASAAPLRTITADTFRKLFRVYSNFLRGKLKLYTGEACRTGDR

SEQ ID NO: 68 - protein, 166 aa, Artificial Sequence
  EPO_66_P87A
APPRLICDSRVLERYLLEAKEAENITTGCAEHCSLNENITVPDTKVNFYAWKRMEVGQQAVEVWQGLALLSEAVLRGQALLVNSSQAWEPLQLHVDKAVSGLRSLTTLLRALGAQKEAISPPDAASAAPLRTITADTFRKLFRVYSNFLRGKLKLYTGEACRTGDR

SEQ ID NO: 69 - protein, 166 aa, Artificial Sequence
  EPO_67_W88S
APPRLICDSRVLERYLLEAKEAENITTGCAEHCSLNENITVPDTKVNFYAWKRMEVGQQAVEVWQGLALLSEAVLRGQALLVNSSQPSEPLQLHVDKAVSGLRSLTTLLRALGAQKEAISPPDAASAAPLRTITADTFRKLFRVYSNFLRGKLKLYTGEACRTGDR

SEQ ID NO: 70 - protein, 166 aa, Artificial Sequence
  EPO_68_W88H
APPRLICDSRVLERYLLEAKEAENITTGCAEHCSLNENITVPDTKVNFYAWKRMEVGQQAVEVWQGLALLSEAVLRGQALLVNSSQPHEPLQLHVDKAVSGLRSLTTLLRALGAQKEAISPPDAASAAPLRTITADTFRKLFRVYSNFLRGKLKLYTGEACRTGDR

SEQ ID NO: 71 - protein, 166 aa, Artificial Sequence
  EPO_69_E89Q
APPRLICDSRVLERYLLEAKEAENITTGCAEHCSLNENITVPDTKVNFYAWKRMEVGQQAVEVWQGLALLSEAVLRGQALLVNSSQPWQPLQLHVDKAVSGLRSLTTLLRALGAQKEAISPPDAASAAPLRTITADTFRKLFRVYSNFLRGKLKLYTGEACRTGDR

SEQ ID NO: 72 - protein, 166 aa, Artificial Sequence
  EPO_70_E89H
APPRLICDSRVLERYLLEAKEAENITTGCAEHCSLNENITVPDTKVNFYAWKRMEVGQQAVEVWQGLALLSEAVLRGQALLVNSSQPWHPLQLHVDKAVSGLRSLTTLLRALGAQKEAISPPDAASAAPLRTITADTFRKLFRVYSNFLRGKLKLYTGEACRTGDR

SEQ ID NO: 73 - protein, 166 aa, Artificial Sequence
  EPO_71_P90S
APPRLICDSRVLERYLLEAKEAENITTGCAEHCSLNENITVPDTKVNFYAWKRMEVGQQAVEVWQGLALLSEAVLRGQALLVNSSQPWESLQLHVDKAVSGLRSLTTLLRALGAQKEAISPPDAASAAPLRTITADTFRKLFRVYSNFLRGKLKLYTGEACRTGDR

SEQ ID NO: 74 - protein, 166 aa, Artificial Sequence
  EPO_72_P90A
APPRLICDSRVLERYLLEAKEAENITTGCAEHCSLNENITVPDTKVNFYAWKRMEVGQQAVEVWQGLALLSEAVLRGQALLVNSSQPWEALQLHVDKAVSGLRSLTTLLRALGAQKEAISPPDAASAAPLRTITADTFRKLFRVYSNFLRGKLKLYTGEACRTGDR

SEQ ID NO: 75 - protein, 166 aa, Artificial Sequence
  EPO_73_L93V
APPRLICDSRVLERYLLEAKEAENITTGCAEHCSLNENITVPDTKVNFYAWKRMEVGQQAVEVWQGLALLSEAVLRGQALLVNSSQPWEPLQVHVDKAVSGLRSLTTLLRALGAQKEAISPPDAASAAPLRTITADTFRKLFRVYSNFLRGKLKLYTGEACRTGDR

SEQ ID NO: 76 - protein, 166 aa, Artificial Sequence
  EPO_74_L93I
APPRLICDSRVLERYLLEAKEAENITTGCAEHCSLNENITVPDTKVNFYAWKRMEVGQQAVEVWQGLALLSEAVLRGQALLVNSSQPWEPLQIHVDKAVSGLRSLTTLLRALGAQKEAISPPDAASAAPLRTITADTFRKLFRVYSNFLRGKLKLYTGEACRTGDR

SEQ ID NO: 77 - protein, 166 aa, Artificial Sequence
  EPO_75_D96Q
APPRLICDSRVLERYLLEAKEAENITTGCAEHCSLNENITVPDTKVNFYAWKRMEVGQQAVEVWQGLALLSEAVLRGQALLVNSSQPWEPLQLHVQKAVSGLRSLTTLLRALGAQKEAISPPDAASAAPLRTITADTFRKLFRVYSNFLRGKLKLYTGEACRTGDR

SEQ ID NO: 78 - protein, 166 aa, Artificial Sequence
  EPO_76_D96H
APPRLICDSRVLERYLLEAKEAENITTGCAEHCSLNENITVPDTKVNFYAWKRMEVGQQAVEVWQGLALLSEAVLRGQALLVNSSQPWEPLQLHVHKAVSGLRSLTTLLRALGAQKEAISPPDAASAAPLRTITADTFRKLFRVYSNFLRGKLKLYTGEACRTGDR

SEQ ID NO: 79 - protein, 166 aa, Artificial Sequence
  EPO_77_K97Q
APPRLICDSRVLERYLLEAKEAENITTGCAEHCSLNENITVPDTKVNFYAWKRMEVGQQAVEVWQGLALLSEAVLRGQALLVNSSQPWEPLQLHVDQAVSGLRSLTTLLRALGAQKEAISPPDAASAAPLRTITADTFRKLFRVYSNFLRGKLKLYTGEACRTGDR

SEQ ID NO: 80 - protein, 166 aa, Artificial Sequence
  EPO_78_K97T
APPRLICDSRVLERYLLEAKEAENITTGCAEHCSLNENITVPDTKVNFYAWKRMEVGQQAVEVWQGLALLSEAVLRGQALLVNSSQPWEPLQLHVDTAVSGLRSLTTLLRALGAQKEAISPPDAASAAPLRTITADTFRKLFRVYSNFLRGKLKLYTGEACRTGDR

SEQ ID NO: 81 - protein, 166 aa, Artificial Sequence
  EPO_79_L102V
APPRLICDSRVLERYLLEAKEAENITTGCAEHCSLNENITVPDTKVNFYAWKRMEVGQQAVEVWQGLALLSEAVLRGQALLVNSSQPWEPLQLHVDKAVSGVRSLTTLLRALGAQKEAISPPDAASAAPLRTITADTFRKLFRVYSNFLRGKLKLYTGEACRTGDR

SEQ ID NO: 82 - protein, 166 aa, Artificial Sequence
  EPO_80_L102I
APPRLICDSRVLERYLLEAKEAENITTGCAEHCSLNENITVPDTKVNFYAWKRMEVGQQAVEVWQGLALLSEAVLRGQALLVNSSQPWEPLQLHVDKAVSGIRSLTTLLRALGAQKEAISPPDAASAAPLRTITADTFRKLFRVYSNFLRGKLKLYTGEACRTGDR

SEQ ID NO: 83 - protein, 166 aa, Artificial Sequence
  EPO_81_R110H
APPRLICDSRVLERYLLEAKEAENITTGCAEHCSLNENITVPDTKVNFYAWKRMEVGQQAVEVWQGLALLSEAVLRGQALLVNSSQPWEPLQLHVDKAVSGLRSLTTLLHALGAQKEAISPPDAASAAPLRTITADTFRKLFRVYSNFLRGKLKLYTGEACRTGDR

SEQ ID NO: 84 - protein, 166 aa, Artificial Sequence
  EPO_82_R110Q
APPRLICDSRVLERYLLEAKEAENITTGCAEHCSLNENITVPDTKVNFYAWKRMEVGQQAVEVWQGLALLSEAVLRGQALLVNSSQPWEPLQLHVDKAVSGLRSLTTLLQALGAQKEAISPPDAASAAPLRTITADTFRKLFRVYSNFLRGKLKLYTGEACRTGDR

SEQ ID NO: 85 - protein, 166 aa, Artificial Sequence
  EPO_83_L122V
APPRLICDSRVLERYLLEAKEAENITTGCAEHCSLNENITVPDTKVNFYAWKRMEVGQQAVEVWQGLALLSEAVLRGQALLVNSSQPWEPLQLHVDKAVSGLRSLTTLLRAVGAQKEAISPPDAASAAPLRTITADTFRKLFRVYSNFLRGKLKLYTGEACRTGDR

SEQ ID NO: 86 - protein, 166 aa, Artificial Sequence
  EPO_84_L122I
APPRLICDSRVLERYLLEAKEAENITTGCAEHCSLNENITVPDTKVNFYAWKRMEVGQQAVEVWQGLALLSEAVLRGQALLVNSSQPWEPLQLHVDKAVSGLRSLTTLLRAIGAQKEAISPPDAASAAPLRTITADTFRKLFRVYSNFLRGKLKLYTGEACRTGDR

SEQ ID NO: 87 - protein, 166 aa, Artificial Sequence
  EPO_85_K116Q
APPRLICDSRVLERYLLEAKEAENITTGCAEHCSLNENITVPDTKVNFYAWKRMEVGQQAVEVWQGLALLSEAVLRGQALLVNSSQPWEPLQLHVDKAVSGLRSLTTLLRALGAQQEAISPPDAASAAPLRTITADTFRKLFRVYSNFLRGKLKLYTGEACRTGDR

SEQ ID NO: 88 - protein, 166 aa, Artificial Sequence
  EPO_86_K116T
APPRLICDSRVLERYLLEAKEAENITTGCAEHCSLNENITVPDTKVNFYAWKRMEVGQQAVEVWQGLALLSEAVLRGQALLVNSSQPWEPLQLHVDKAVSGLRSLTTLLRALGAQTEAISPPDAASAAPLRTITADTFRKLFRVYSNFLRGKLKLYTGEACRTGDR

SEQ ID NO: 89 - protein, 166 aa, Artificial Sequence
  EPO_87_P121S
APPRLICDSRVLERYLLEAKEAENITTGCAEHCSLNENITVPDTKVNFYAWKRMEVGQQAVEVWQGLALLSEAVLRGQALLVNSSQPWEPLQLHVDKAVSGLRSLTTLLRALGAQKEAISSPDAASAAPLRTITADTFRKLFRVYSNFLRGKLKLYTGEACRTGDR

SEQ ID NO: 90 - protein, 166 aa, Artificial Sequence
  EPO_88_P121A
APPRLICDSRVLERYLLEAKEAENITTGCAEHCSLNENITVPDTKVNFYAWKRMEVGQQAVEVWQGLALLSEAVLRGQALLVNSSQPWEPLQLHVDKAVSGLRSLTTLLRALGAQKEAISAPDAASAAPLRTITADTFRKLFRVYSNFLRGKLKLYTGEACRTGDR

SEQ ID NO: 91 - protein, 166 aa, Artificial Sequence
  EPO_89_P122S
APPRLICDSRVLERYLLEAKEAENITTGCAEHCSLNENITVPDTKVNFYAWKRMEVGQQAVEVWQGLALLSEAVLRGQALLVNSSQPWEPLQLHVDKAVSGLRSLTTLLRALGAQKEAISPSDAASAAPLRTITADTFRKLFRVYSNFLRGKLKLYTGEACRTGDR

SEQ ID NO: 92 - protein, 166 aa, Artificial Sequence
  EPO_90_P122A
APPRLICDSRVLERYLLEAKEAENITTGCAEHCSLNENITVPDTKVNFYAWKRMEVGQQAVEVWQGLALLSEAVLRGQALLVNSSQPWEPLQLHVDKAVSGLRSLTTLLRALGAQKEAISPADAASAAPLRTITADTFRKLFRVYSNFLRGKLKLYTGEACRTGDR

SEQ ID NO: 93 - protein, 166 aa, Artificial Sequence
  EPO_91_D123Q
APPRLICDSRVLERYLLEAKEAENITTGCAEHCSLNENITVPDTKVNFYAWKRMEVGQQAVEVWQGLALLSEAVLRGQALLVNSSQPWEPLQLHVDKAVSGLRSLTTLLRALGAQKEAISPPQAASAAPLRTITADTFRKLFRVYSNFLRGKLKLYTGEACRTGDR

SEQ ID NO: 94 - protein, 166 aa, Artificial Sequence
  EPO_92_D123H
APPRLICDSRVLERYLLEAKEAENITTGCAEHCSLNENITVPDTKVNFYAWKRMEVGQQAVEVWQGLALLSEAVLRGQALLVNSSQPWEPLQLHVDKAVSGLRSLTTLLRALGAQKEAISPPHAASAAPLRTITADTFRKLFRVYSNFLRGKLKLYTGEACRTGDR

SEQ ID NO: 95 - protein, 166 aa, Artificial Sequence
  EPO_93_P129S
APPRLICDSRVLERYLLEAKEAENITTGCAEHCSLNENITVPDTKVNFYAWKRMEVGQQAVEVWQGLALLSEAVLRGQALLVNSSQPWEPLQLHVDKAVSGLRSLTTLLRALGAQKEAISPPDAASAASLRTITADTFRKLFRVYSNFLRGKLKLYTGEACRTGDR

SEQ ID NO: 96 - protein, 166 aa, Artificial Sequence
  EPO_94_P129A
APPRLICDSRVLERYLLEAKEAENITTGCAEHCSLNENITVPDTKVNFYAWKRMEVGQQAVEVWQGLALLSEAVLRGQALLVNSSQPWEPLQLHVDKAVSGLRSLTTLLRALGAQKEAISPPDAASAAALRTITADTFRKLFRVYSNFLRGKLKLYTGEACRTGDR

SEQ ID NO: 97 - protein, 166 aa, Artificial Sequence
  EPO_95_L130V
APPRLICDSRVLERYLLEAKEAENITTGCAEHCSLNENITVPDTKVNFYAWKRMEVGQQAVEVWQGLALLSEAVLRGQALLVNSSQPWEPLQLHVDKAVSGLRSLTTLLRALGAQKEAISPPDAASAAPVRTITADTFRKLFRVYSNFLRGKLKLYTGEACRTGDR

SEQ ID NO: 98 - protein, 166 aa, Artificial Sequence
  EPO_96_L130I
APPRLICDSRVLERYLLEAKEAENITTGCAEHCSLNENITVPDTKVNFYAWKRMEVGQQAVEVWQGLALLSEAVLRGQALLVNSSQPWEPLQLHVDKAVSGLRSLTTLLRALGAQKEAISPPDAASAAPIRTITADTFRKLFRVYSNFLRGKLKLYTGEACRTGDR

SEQ ID NO: 99 - protein, 166 aa, Artificial Sequence
  EPO_97_R131H
APPRLICDSRVLERYLLEAKEAENITTGCAEHCSLNENITVPDTKVNFYAWKRMEVGQQAVEVWQGLALLSEAVLRGQALLVNSSQPWEPLQLHVDKAVSGLRSLTTLLRALGAQKEAISPPDAASAAPLHTITADTFRKLFRVYSNFLRGKLKLYTGEACRTGDR

SEQ ID NO: 100 - protein, 166 aa, Artificial Sequence
  EPO_98_R131Q
APPRLICDSRVLERYLLEAKEAENITTGCAEHCSLNENITVPDTKVNFYAWKRMEVGQQAVEVWQGLALLSEAVLRGQALLVNSSQPWEPLQLHVDKAVSGLRSLTTLLRALGAQKEAISPPDAASAAPLQTITADTFRKLFRVYSNFLRGKLKLYTGEACRTGDR

SEQ ID NO: 101 - protein, 166 aa, Artificial Sequence
  EPO_99_D136Q
APPRLICDSRVLERYLLEAKEAENITTGCAEHCSLNENITVPDTKVNFYAWKRMEVGQQAVEVWQGLALLSEAVLRGQALLVNSSQPWEPLQLHVDKAVSGLRSLTTLLRALGAQKEAISPPDAASAAPLRTITAQTFRKLFRVYSNFLRGKLKLYTGEACRTGDR

SEQ ID NO: 102 - protein, 166 aa, Artificial Sequence
  EPO_100_D136H
APPRLICDSRVLERYLLEAKEAENITTGCAEHCSLNENITVPDTKVNFYAWKRMEVGQQAVEVWQGLALLSEAVLRGQALLVNSSQPWEPLQLHVDKAVSGLRSLTTLLRALGAQKEAISPPDAASAAPLRTITAHTFRKLFRVYSNFLRGKLKLYTGEACRTGDR

SEQ ID NO: 103 - protein, 166 aa, Artificial Sequence
  EPO_101_R143H
APPRLICDSRVLERYLLEAKEAENITTGCAEHCSLNENITVPDTKVNFYAWKRMEVGQQAVEVWQGLALLSEAVLRGQALLVNSSQPWEPLQLHVDKAVSGLRSLTTLLRALGAQKEAISPPDAASAAPLRTITADTFRKLFHVYSNFLRGKLKLYTGEACRTGDR

SEQ ID NO: 104 - protein, 166 aa, Artificial Sequence
  EPO_102_R143Q
APPRLICDSRVLERYLLEAKEAENITTGCAEHCSLNENITVPDTKVNFYAWKRMEVGQQAVEVWQGLALLSEAVLRGQALLVNSSQPWEPLQLHVDKAVSGLRSLTTLLRALGAQKEAISPPDAASAAPLRTITADTFRKLFQVYSNFLRGKLKLYTGEACRTGDR

SEQ ID NO: 105 - protein, 166 aa, Artificial Sequence
  EPO_103_Y145H
APPRLICDSRVLERYLLEAKEAENITTGCAEHCSLNENITVPDTKVNFYAWKRMEVGQQAVEVWQGLALLSEAVLRGQALLVNSSQPWEPLQLHVDKAVSGLRSLTTLLRALGAQKEAISPPDAASAAPLRTITADTFRKLFRVHSNFLRGKLKLYTGEACRTGDR

SEQ ID NO: 106 - protein, 166 aa, Artificial Sequence
  EPO_104_Y145I
APPRLICDSRVLERYLLEAKEAENITTGCAEHCSLNENITVPDTKVNFYAWKRMEVGQQAVEVWQGLALLSEAVLRGQALLVNSSQPWEPLQLHVDKAVSGLRSLTTLLRALGAQKEAISPPDAASAAPLRTITADTFRKLFRVISNFLRGKLKLYTGEACRTGDR

SEQ ID NO: 107 - protein, 166 aa, Artificial Sequence
  EPO_105_R150H
APPRLICDSRVLERYLLEAKEAENITTGCAEHCSLNENITVPDTKVNFYAWKRMEVGQQAVEVWQGLALLSEAVLRGQALLVNSSQPWEPLQLHVDKAVSGLRSLTTLLRALGAQKEAISPPDAASAAPLRTITADTFRKLFRVYSNFLHGKLKLYTGEACRTGDR

SEQ ID NO: 108 - protein, 166 aa, Artificial Sequence
  EPO_106_R150Q
APPRLICDSRVLERYLLEAKEAENITTGCAEHCSLNENITVPDTKVNFYAWKRMEVGQQAVEVWQGLALLSEAVLRGQALLVNSSQPWEPLQLHVDKAVSGLRSLTTLLRALGAQKEAISPPDAASAAPLRTITADTFRKLFRVYSNFLQGKLKLYTGEACRTGDR

SEQ ID NO: 109 - protein, 166 aa, Artificial Sequence
  EPO_107_K152Q
APPRLICDSRVLERYLLEAKEAENITTGCAEHCSLNENITVPDTKVNFYAWKRMEVGQQAVEVWQGLALLSEAVLRGQALLVNSSQPWEPLQLHVDKAVSGLRSLTTLLRALGAQKEAISPPDAASAAPLRTITADTFRKLFRVYSNFLRGQLKLYTGEACRTGDR

SEQ ID NO: 110 - protein, 166 aa, Artificial Sequence
  EPO_108_K152T
APPRLICDSRVLERYLLEAKEAENITTGCAEHCSLNENITVPDTKVNFYAWKRMEVGQQAVEVWQGLALLSEAVLRGQALLVNSSQPWEPLQLHVDKAVSGLRSLTTLLRALGAQKEAISPPDAASAAPLRTITADTFRKLFRVYSNFLRGTLKLYTGEACRTGDR

SEQ ID NO: 111 - protein, 166 aa, Artificial Sequence
  EPO_109_K154Q
APPRLICDSRVLERYLLEAKEAENITTGCAEHCSLNENITVPDTKVNFYAWKRMEVGQQAVEVWQGLALLSEAVLRGQALLVNSSQPWEPLQLHVDKAVSGLRSLTTLLRALGAQKEAISPPDAASAAPLRTITADTFRKLFRVYSNFLRGKLQLYTGEACRTGDR

SEQ ID NO: 112 - protein, 166 aa, Artificial Sequence
  EPO_110_K154T
APPRLICDSRVLERYLLEAKEAENITTGCAEHCSLNENITVPDTKVNFYAWKRMEVGQQAVEVWQGLALLSEAVLRGQALLVNSSQPWEPLQLHVDKAVSGLRSLTTLLRALGAQKEAISPPDAASAAPLRTITADTFRKLFRVYSNFLRGKLTLYTGEACRTGDR

SEQ ID NO: 113 - protein, 166 aa, Artificial Sequence
  EPO_111_L155V
APPRLICDSRVLERYLLEAKEAENITTGCAEHCSLNENITVPDTKVNFYAWKRMEVGQQAVEVWQGLALLSEAVLRGQALLVNSSQPWEPLQLHVDKAVSGLRSLTTLLRALGAQKEAISPPDAASAAPLRTITADTFRKLFRVYSNFLRGKLKVYTGEACRTGDR

SEQ ID NO: 114 - protein, 166 aa, Artificial Sequence
  EPO_112_L155I
APPRLICDSRVLERYLLEAKEAENITTGCAEHCSLNENITVPDTKVNFYAWKRMEVGQQAVEVWQGLALLSEAVLRGQALLVNSSQPWEPLQLHVDKAVSGLRSLTTLLRALGAQKEAISPPDAASAAPLRTITADTFRKLFRVYSNFLRGKLKIYTGEACRTGDR

SEQ ID NO: 115 - protein, 166 aa, Artificial Sequence
  EPO_113_E159Q
APPRLICDSRVLERYLLEAKEAENITTGCAEHCSLNENITVPDTKVNFYAWKRMEVGQQAVEVWQGLALLSEAVLRGQALLVNSSQPWEPLQLHVDKAVSGLRSLTTLLRALGAQKEAISPPDAASAAPLRTITADTFRKLFRVYSNFLRGKLKLYTGQACRTGDR

SEQ ID NO: 116 - protein, 166 aa, Artificial Sequence
  EPO_114_E159H
APPRLICDSRVLERYLLEAKEAENITTGCAEHCSLNENITVPDTKVNFYAWKRMEVGQQAVEVWQGLALLSEAVLRGQALLVNSSQPWEPLQLHVDKAVSGLRSLTTLLRALGAQKEAISPPDAASAAPLRTITADTFRKLFRVYSNFLRGKLKLYTGHACRTGDR

SEQ ID NO: 117 - protein, 166 aa, Artificial Sequence
  EPO_115_R162H
APPRLICDSRVLERYLLEAKEAENITTGCAEHCSLNENITVPDTKVNFYAWKRMEVGQQAVEVWQGLALLSEAVLRGQALLVNSSQPWEPLQLHVDKAVSGLRSLTTLLRALGAQKEAISPPDAASAAPLRTITADTFRKLFRVYSNFLRGKLKLYTGEACHTGDR

SEQ ID NO: 118 - protein, 166 aa, Artificial Sequence
  EPO_116_R162Q
APPRLICDSRVLERYLLEAKEAENITTGCAEHCSLNENITVPDTKVNFYAWKRMEVGQQAVEVWQGLALLSEAVLRGQALLVNSSQPWEPLQLHVDKAVSGLRSLTTLLRALGAQKEAISPPDAASAAPLRTITADTFRKLFRVYSNFLRGKLKLYTGEACQTGDR

SEQ ID NO: 119 - protein, 166 aa, Artificial Sequence
  EPO_117_C29A
APPRLICDSRVLERYLLEAKEAENITTGAAEHCSLNENITVPDTKVNFYAWKRMEVGQQAVEVWQGLALLSEAVLRGQALLVNSSQPWEPLQLHVDKAVSGLRSLTTLLRALGAQKEAISPPDAASAAPLRTITADTFRKLFRVYSNFLRGKLKLYTGEACRTGDR

SEQ ID NO: 120 - protein, 166 aa, Artificial Sequence
  EPO_118_C29I
APPRLICDSRVLERYLLEAKEAENITTGIAEHCSLNENITVPDTKVNFYAWKRMEVGQQAVEVWQGLALLSEAVLRGQALLVNSSQPWEPLQLHVDKAVSGLRSLTTLLRALGAQKEAISPPDAASAAPLRTITADTFRKLFRVYSNFLRGKLKLYTGEACRTGDR

SEQ ID NO: 121 - protein, 166 aa, Artificial Sequence
  EPO_119_C29T
APPRLICDSRVLERYLLEAKEAENITTGTAEHCSLNENITVPDTKVNFYAWKRMEVGQQAVEVWQGLALLSEAVLRGQALLVNSSQPWEPLQLHVDKAVSGLRSLTTLLRALGAQKEAISPPDAASAAPLRTITADTFRKLFRVYSNFLRGKLKLYTGEACRTGDR

SEQ ID NO: 122 - protein, 166 aa, Artificial Sequence
  EPO_120_C7A
APPRLIADSRVLERYLLEAKEAENITTGCAEHCSLNENITVPDTKVNFYAWKRMEVGQQAVEVWQGLALLSEAVLRGQALLVNSSQPWEPLQLHVDKAVSGLRSLTTLLRALGAQKEAISPPDAASAAPLRTITADTFRKLFRVYSNFLRGKLKLYTGEACRTGDR

SEQ ID NO: 123 - protein, 166 aa, Artificial Sequence
  EPO_121_C7I
APPRLIIDSRVLERYLLEAKEAENITTGCAEHCSLNENITVPDTKVNFYAWKRMEVGQQAVEVWQGLALLSEAVLRGQALLVNSSQPWEPLQLHVDKAVSGLRSLTTLLRALGAQKEAISPPDAASAAPLRTITADTFRKLFRVYSNFLRGKLKLYTGEACRTGDR

SEQ ID NO: 124 - protein, 166 aa, Artificial Sequence
  EPO_122_C7T
APPRLITDSRVLERYLLEAKEAENITTGCAEHCSLNENITVPDTKVNFYAWKRMEVGQQAVEVWQGLALLSEAVLRGQALLVNSSQPWEPLQLHVDKAVSGLRSLTTLLRALGAQKEAISPPDAASAAPLRTITADTFRKLFRVYSNFLRGKLKLYTGEACRTGDR

SEQ ID NO: 125 - protein, 166 aa, Artificial Sequence
  EPO_123_D123N
APPRLICDSRVLERYLLEAKEAENITTGCAEHCSLNENITVPDTKVNFYAWKRMEVGQQAVEVWQGLALLSEAVLRGQALLVNSSQPWEPLQLHVDKAVSGLRSLTTLLRALGAQKEAISPPNAASAAPLRTITADTFRKLFRVYSNFLRGKLKLYTGEACRTGDR

SEQ ID NO: 126 - protein, 166 aa, Artificial Sequence
  EPO_124_D136N
APPRLICDSRVLERYLLEAKEAENITTGCAEHCSLNENITVPDTKVNFYAWKRMEVGQQAVEVWQGLALLSEAVLRGQALLVNSSQPWEPLQLHVDKAVSGLRSLTTLLRALGAQKEAISPPDAASAAPLRTITANTFRKLFRVYSNFLRGKLKLYTGEACRTGDR

SEQ ID NO: 127 - protein, 166 aa, Artificial Sequence
  EPO_125_D43N
APPRLICDSRVLERYLLEAKEAENITTGCAEHCSLNENITVPNTKVNFYAWKRMEVGQQAVEVWQGLALLSEAVLRGQALLVNSSQPWEPLQLHVDKAVSGLRSLTTLLRALGAQKEAISPPDAASAAPLRTITADTFRKLFRVYSNFLRGKLKLYTGEACRTGDR

SEQ ID NO: 128 - protein, 166 aa, Artificial Sequence
  EPO_126_D96N
APPRLICDSRVLERYLLEAKEAENITTGCAEHCSLNENITVPDTKVNFYAWKRMEVGQQAVEVWQGLALLSEAVLRGQALLVNSSQPWEPLQLHVNKAVSGLRSLTTLLRALGAQKEAISPPDAASAAPLRTITADTFRKLFRVYSNFLRGKLKLYTGEACRTGDR

SEQ ID NO: 129 - protein, 166 aa, Artificial Sequence
  EPO_127_E159N
APPRLICDSRVLERYLLEAKEAENITTGCAEHCSLNENITVPDTKVNFYAWKRMEVGQQAVEVWQGLALLSEAVLRGQALLVNSSQPWEPLQLHVDKAVSGLRSLTTLLRALGAQKEAISPPDAASAAPLRTITADTFRKLFRVYSNFLRGKLKLYTGNACRTGDR

SEQ ID NO: 130 - protein, 166 aa, Artificial Sequence
  EPO_128_E18N
APPRLICDSRVLERYLLNAKEAENITTGCAEHCSLNENITVPDTKVNFYAWKRMEVGQQAVEVWQGLALLSEAVLRGQALLVNSSQPWEPLQLHVDKAVSGLRSLTTLLRALGAQKEAISPPDAASAAPLRTITADTFRKLFRVYSNFLRGKLKLYTGEACRTGDR

SEQ ID NO: 131 - protein, 166 aa, Artificial Sequence
  EPO_129_E21N
APPRLICDSRVLERYLLEAKNAENITTGCAEHCSLNENITVPDTKVNFYAWKRMEVGQQAVEVWQGLALLSEAVLRGQALLVNSSQPWEPLQLHVDKAVSGLRSLTTLLRALGAQKEAISPPDAASAAPLRTITADTFRKLFRVYSNFLRGKLKLYTGEACRTGDR

SEQ ID NO: 132 - protein, 166 aa, Artificial Sequence
  EPO_130_E23N
APPRLICDSRVLERYLLEAKEANNITTGCAEHCSLNENITVPDTKVNFYAWKRMEVGQQAVEVWQGLALLSEAVLRGQALLVNSSQPWEPLQLHVDKAVSGLRSLTTLLRALGAQKEAISPPDAASAAPLRTITADTFRKLFRVYSNFLRGKLKLYTGEACRTGDR

SEQ ID NO: 133 - protein, 166 aa, Artificial Sequence
  EPO_131_E31N
APPRLICDSRVLERYLLEAKEAENITTGCANHCSLNENITVPDTKVNFYAWKRMEVGQQAVEVWQGLALLSEAVLRGQALLVNSSQPWEPLQLHVDKAVSGLRSLTTLLRALGAQKEAISPPDAASAAPLRTITADTFRKLFRVYSNFLRGKLKLYTGEACRTGDR

SEQ ID NO: 134 - protein, 166 aa, Artificial Sequence
  EPO_132_E37N
APPRLICDSRVLERYLLEAKEAENITTGCAEHCSLNNNITVPDTKVNFYAWKRMEVGQQAVEVWQGLALLSEAVLRGQALLVNSSQPWEPLQLHVDKAVSGLRSLTTLLRALGAQKEAISPPDAASAAPLRTITADTFRKLFRVYSNFLRGKLKLYTGEACRTGDR

SEQ ID NO: 135 - protein, 166 aa, Artificial Sequence
  EPO_133_E55N
APPRLICDSRVLERYLLEAKEAENITTGCAEHCSLNENITVPDTKVNFYAWKRMNVGQQAVEVWQGLALLSEAVLRGQALLVNSSQPWEPLQLHVDKAVSGLRSLTTLLRALGAQKEAISPPDAASAAPLRTITADTFRKLFRVYSNFLRGKLKLYTGEACRTGDR

SEQ ID NO: 136 - protein, 166 aa, Artificial Sequence
  EPO_134_E62N
APPRLICDSRVLERYLLEAKEAENITTGCAEHCSLNENITVPDTKVNFYAWKRMEVGQQAVNVWQGLALLSEAVLRGQALLVNSSQPWEPLQLHVDKAVSGLRSLTTLLRALGAQKEAISPPDAASAAPLRTITADTFRKLFRVYSNFLRGKLKLYTGEACRTGDR

SEQ ID NO: 137 - protein, 166 aa, Artificial Sequence
  EPO_135_E72N
APPRLICDSRVLERYLLEAKEAENITTGCAEHCSLNENITVPDTKVNFYAWKRMEVGQQAVEVWQGLALLSNAVLRGQALLVNSSQPWEPLQLHVDKAVSGLRSLTTLLRALGAQKEAISPPDAASAAPLRTITADTFRKLFRVYSNFLRGKLKLYTGEACRTGDR

SEQ ID NO: 138 - protein, 166 aa, Artificial Sequence
  EPO_136_E89N
APPRLICDSRVLERYLLEAKEAENITTGCAEHCSLNENITVPDTKVNFYAWKRMEVGQQAVEVWQGLALLSEAVLRGQALLVNSSQPWNPLQLHVDKAVSGLRSLTTLLRALGAQKEAISPPDAASAAPLRTITADTFRKLFRVYSNFLRGKLKLYTGEACRTGDR

SEQ ID NO: 139 - protein, 166 aa, Artificial Sequence
  EPO_137_K116N
APPRLICDSRVLERYLLEAKEAENITTGCAEHCSLNENITVPDTKVNFYAWKRMEVGQQAVEVWQGLALLSEAVLRGQALLVNSSQPWEPLQLHVDKAVSGLRSLTTLLRALGAQNEAISPPDAASAAPLRTITADTFRKLFRVYSNFLRGKLKLYTGEACRTGDR

SEQ ID NO: 140 - protein, 166 aa, Artificial Sequence
  EPO_138_K152N
APPRLICDSRVLERYLLEAKEAENITTGCAEHCSLNENITVPDTKVNFYAWKRMEVGQQAVEVWQGLALLSEAVLRGQALLVNSSQPWEPLQLHVDKAVSGLRSLTTLLRALGAQKEAISPPDAASAAPLRTITADTFRKLFRVYSNFLRGNLKLYTGEACRTGDR

SEQ ID NO: 141 - protein, 166 aa, Artificial Sequence
  EPO_139_K154N
APPRLICDSRVLERYLLEAKEAENITTGCAEHCSLNENITVPDTKVNFYAWKRMEVGQQAVEVWQGLALLSEAVLRGQALLVNSSQPWEPLQLHVDKAVSGLRSLTTLLRALGAQKEAISPPDAASAAPLRTITADTFRKLFRVYSNFLRGKLNLYTGEACRTGDR

SEQ ID NO: 142 - protein, 166 aa, Artificial Sequence
  EPO_140_K20N
APPRLICDSRVLERYLLEANEAENITTGCAEHCSLNENITVPDTKVNFYAWKRMEVGQQAVEVWQGLALLSEAVLRGQALLVNSSQPWEPLQLHVDKAVSGLRSLTTLLRALGAQKEAISPPDAASAAPLRTITADTFRKLFRVYSNFLRGKLKLYTGEACRTGDR

SEQ ID NO: 143 - protein, 166 aa, Artificial Sequence
  EPO_141_K45N
APPRLICDSRVLERYLLEAKEAENITTGCAEHCSLNENITVPDTNVNFYAWKRMEVGQQAVEVWQGLALLSEAVLRGQALLVNSSQPWEPLQLHVDKAVSGLRSLTTLLRALGAQKEAISPPDAASAAPLRTITADTFRKLFRVYSNFLRGKLKLYTGEACRTGDR

SEQ ID NO: 144 - protein, 166 aa, Artificial Sequence
  EPO_142_K52N
APPRLICDSRVLERYLLEAKEAENITTGCAEHCSLNENITVPDTKVNFYAWNRMEVGQQAVEVWQGLALLSEAVLRGQALLVNSSQPWEPLQLHVDKAVSGLRSLTTLLRALGAQKEAISPPDAASAAPLRTITADTFRKLFRVYSNFLRGKLKLYTGEACRTGDR

SEQ ID NO: 145 - protein, 166 aa, Artificial Sequence
  EPO_143_K97N
APPRLICDSRVLERYLLEAKEAENITTGCAEHCSLNENITVPDTKVNFYAWKRMEVGQQAVEVWQGLALLSEAVLRGQALLVNSSQPWEPLQLHVDNAVSGLRSLTTLLRALGAQKEAISPPDAASAAPLRTITADTFRKLFRVYSNFLRGKLKLYTGEACRTGDR

SEQ ID NO: 146 - protein, 166 aa, Artificial Sequence
  EPO_144_D8N
APPRLICNSRVLERYLLEAKEAENITTGCAEHCSLNENITVPDTKVNFYAWKRMEVGQQAVEVWQGLALLSEAVLRGQALLVNSSQPWEPLQLHVDKAVSGLRSLTTLLRALGAQKEAISPPDAASAAPLRTITADTFRKLFRVYSNFLRGKLKLYTGEACRTGDR

SEQ ID NO: 147 - protein, 166 aa, Artificial Sequence
  EPO_145_D165Q
APPRLICDSRVLERYLLEAKEAENITTGCAEHCSLNENITVPDTKVNFYAWKRMEVGQQAVEVWQGLALLSEAVLRGQALLVNSSQPWEPLQLHVDKAVSGLRSLTTLLRALGAQKEAISPPDAASAAPLRTITADTFRKLFRVYSNFLRGKLKLYTGEACRTGQR

SEQ ID NO: 148 - protein, 166 aa, Artificial Sequence
  EPO_146_D165H
APPRLICDSRVLERYLLEAKEAENITTGCAEHCSLNENITVPDTKVNFYAWKRMEVGQQAVEVWQGLALLSEAVLRGQALLVNSSQPWEPLQLHVDKAVSGLRSLTTLLRALGAQKEAISPPDAASAAPLRTITADTFRKLFRVYSNFLRGKLKLYTGEACRTGHR

SEQ ID NO: 149 - protein, 166 aa, Artificial Sequence
  EPO_147_D165N
APPRLICDSRVLERYLLEAKEAENITTGCAEHCSLNENITVPDTKVNFYAWKRMEVGQQAVEVWQGLALLSEAVLRGQALLVNSSQPWEPLQLHVDKAVSGLRSLTTLLRALGAQKEAISPPDAASAAPLRTITADTFRKLFRVYSNFLRGKLKLYTGEACRTGNR

SEQ ID NO: 150 - protein, 166 aa, Artificial Sequence
  EPO_148_R166H
APPRLICDSRVLERYLLEAKEAENITTGCAEHCSLNENITVPDTKVNFYAWKRMEVGQQAVEVWQGLALLSEAVLRGQALLVNSSQPWEPLQLHVDKAVSGLRSLTTLLRALGAQKEAISPPDAASAAPLRTITADTFRKLFRVYSNFLRGKLKLYTGEACRTGDH

SEQ ID NO: 151 - protein, 166 aa, Artificial Sequence
  EPO_149_R166Q
APPRLICDSRVLERYLLEAKEAENITTGCAEHCSLNENITVPDTKVNFYAWKRMEVGQQAVEVWQGLALLSEAVLRGQALLVNSSQPWEPLQLHVDKAVSGLRSLTTLLRALGAQKEAISPPDAASAAPLRTITADTFRKLFRVYSNFLRGKLKLYTGEACRTGDQ

SEQ ID NO: 152 - protein, 166 aa, Artificial Sequence
  EPO_354_L5I
APPRIICDSRVLERYLLEAKEAENITTGCAEHCSLNENITVPDTKVNFYAWKRMEVGQQAVEVWQGLALLSEAVLRGQALLVNSSQPWEPLQLHVDKAVSGLRSLTTLLRALGAQKEAISPPDAASAAPLRTITADTFRKLFRVYSNFLRGKLKLYTGEACRTGDR

SEQ ID NO: 153 - protein, 166 aa, Artificial Sequence
  EPO_355_L5V
APPRVICDSRVLERYLLEAKEAENITTGCAEHCSLNENITVPDTKVNFYAWKRMEVGQQAVEVWQGLALLSEAVLRGQALLVNSSQPWEPLQLHVDKAVSGLRSLTTLLRALGAQKEAISPPDAASAAPLRTITADTFRKLFRVYSNFLRGKLKLYTGEACRTGDR

SEQ ID NO: 154 - protein, 166 aa, Artificial Sequence
  EPO_356_E13Q
APPRLICDSRVLQRYLLEAKEAENITTGCAEHCSLNENITVPDTKVNFYAWKRMEVGQQAVEVWQGLALLSEAVLRGQALLVNSSQPWEPLQLHVDKAVSGLRSLTTLLRALGAQKEAISPPDAASAAPLRTITADTFRKLFRVYSNFLRGKLKLYTGEACRTGDR

SEQ ID NO: 155 - protein, 166 aa, Artificial Sequence
  EPO_357_E13H
APPRLICDSRVLHRYLLEAKEAENITTGCAEHCSLNENITVPDTKVNFYAWKRMEVGQQAVEVWQGLALLSEAVLRGQALLVNSSQPWEPLQLHVDKAVSGLRSLTTLLRALGAQKEAISPPDAASAAPLRTITADTFRKLFRVYSNFLRGKLKLYTGEACRTGDR

SEQ ID NO: 156 - protein, 166 aa, Artificial Sequence
  EPO_358_E13N
APPRLICDSRVLNRYLLEAKEAENITTGCAEHCSLNENITVPDTKVNFYAWKRMEVGQQAVEVWQGLALLSEAVLRGQALLVNSSQPWEPLQLHVDKAVSGLRSLTTLLRALGAQKEAISPPDAASAAPLRTITADTFRKLFRVYSNFLRGKLKLYTGEACRTGDR

SEQ ID NO: 157 - protein, 166 aa, Artificial Sequence
  EPO_359_R14H
APPRLICDSRVLEHYLLEAKEAENITTGCAEHCSLNENITVPDTKVNFYAWKRMEVGQQAVEVWQGLALLSEAVLRGQALLVNSSQPWEPLQLHVDKAVSGLRSLTTLLRALGAQKEAISPPDAASAAPLRTITADTFRKLFRVYSNFLRGKLKLYTGEACRTGDR

SEQ ID NO: 158 - protein, 166 aa, Artificial Sequence
  EPO_360_R14Q
APPRLICDSRVLEQYLLEAKEAENITTGCAEHCSLNENITVPDTKVNFYAWKRMEVGQQAVEVWQGLALLSEAVLRGQALLVNSSQPWEPLQLHVDKAVSGLRSLTTLLRALGAQKEAISPPDAASAAPLRTITADTFRKLFRVYSNFLRGKLKLYTGEACRTGDR

SEQ ID NO: 159 - protein, 166 aa, Artificial Sequence
  EPO_361_Y15H
APPRLICDSRVLERHLLEAKEAENITTGCAEHCSLNENITVPDTKVNFYAWKRMEVGQQAVEVWQGLALLSEAVLRGQALLVNSSQPWEPLQLHVDKAVSGLRSLTTLLRALGAQKEAISPPDAASAAPLRTITADTFRKLFRVYSNFLRGKLKLYTGEACRTGDR

SEQ ID NO: 160 - protein, 166 aa, Artificial Sequence
  EPO_362_Y15I
APPRLICDSRVLERILLEAKEAENITTGCAEHCSLNENITVPDTKVNFYAWKRMEVGQQAVEVWQGLALLSEAVLRGQALLVNSSQPWEPLQLHVDKAVSGLRSLTTLLRALGAQKEAISPPDAASAAPLRTITADTFRKLFRVYSNFLRGKLKLYTGEACRTGDR

SEQ ID NO: 161 - protein, 166 aa, Artificial Sequence
  EPO_363_L16I
APPRLICDSRVLERYILEAKEAENITTGCAEHCSLNENITVPDTKVNFYAWKRMEVGQQAVEVWQGLALLSEAVLRGQALLVNSSQPWEPLQLHVDKAVSGLRSLTTLLRALGAQKEAISPPDAASAAPLRTITADTFRKLFRVYSNFLRGKLKLYTGEACRTGDR

SEQ ID NO: 162 - protein, 166 aa, Artificial Sequence
  EPO_364_L16V
APPRLICDSRVLERYVLEAKEAENITTGCAEHCSLNENITVPDTKVNFYAWKRMEVGQQAVEVWQGLALLSEAVLRGQALLVNSSQPWEPLQLHVDKAVSGLRSLTTLLRALGAQKEAISPPDAASAAPLRTITADTFRKLFRVYSNFLRGKLKLYTGEACRTGDR

SEQ ID NO: 163 - protein, 166 aa, Artificial Sequence
  EPO_365_L17I
APPRLICDSRVLERYLIEAKEAENITTGCAEHCSLNENITVPDTKVNFYAWKRMEVGQQAVEVWQGLALLSEAVLRGQALLVNSSQPWEPLQLHVDKAVSGLRSLTTLLRALGAQKEAISPPDAASAAPLRTITADTFRKLFRVYSNFLRGKLKLYTGEACRTGDR

SEQ ID NO: 164 - protein, 166 aa, Artificial Sequence
  EPO_366_L17V
APPRLICDSRVLERYLVEAKEAENITTGCAEHCSLNENITVPDTKVNFYAWKRMEVGQQAVEVWQGLALLSEAVLRGQALLVNSSQPWEPLQLHVDKAVSGLRSLTTLLRALGAQKEAISPPDAASAAPLRTITADTFRKLFRVYSNFLRGKLKLYTGEACRTGDR

SEQ ID NO: 165 - protein, 166 aa, Artificial Sequence
  EPO_367_L67I
APPRLICDSRVLERYLLEAKEAENITTGCAEHCSLNENITVPDTKVNFYAWKRMEVGQQAVEVWQGIALLSEAVLRGQALLVNSSQPWEPLQLHVDKAVSGLRSLTTLLRALGAQKEAISPPDAASAAPLRTITADTFRKLFRVYSNFLRGKLKLYTGEACRTGDR

SEQ ID NO: 166 - protein, 166 aa, Artificial Sequence
  EPO_368_L67V
APPRLICDSRVLERYLLEAKEAENITTGCAEHCSLNENITVPDTKVNFYAWKRMEVGQQAVEVWQGVALLSEAVLRGQALLVNSSQPWEPLQLHVDKAVSGLRSLTTLLRALGAQKEAISPPDAASAAPLRTITADTFRKLFRVYSNFLRGKLKLYTGEACRTGDR

SEQ ID NO: 167 - protein, 166 aa, Artificial Sequence
  EPO_369_L70I
APPRLICDSRVLERYLLEAKEAENITTGCAEHCSLNENITVPDTKVNFYAWKRMEVGQQAVEVWQGLALISEAVLRGQALLVNSSQPWEPLQLHVDKAVSGLRSLTTLLRALGAQKEAISPPDAASAAPLRTITADTFRKLFRVYSNFLRGKLKLYTGEACRTGDR

SEQ ID NO: 168 - protein, 166 aa, Artificial Sequence
  EPO_370_L70V
APPRLICDSRVLERYLLEAKEAENITTGCAEHCSLNENITVPDTKVNFYAWKRMEVGQQAVEVWQGLALVSEAVLRGQALLVNSSQPWEPLQLHVDKAVSGLRSLTTLLRALGAQKEAISPPDAASAAPLRTITADTFRKLFRVYSNFLRGKLKLYTGEACRTGDR

SEQ ID NO: 169 - protein, 166 aa, Artificial Sequence
  EPO_371_L81I
APPRLICDSRVLERYLLEAKEAENITTGCAEHCSLNENITVPDTKVNFYAWKRMEVGQQAVEVWQGLALLSEAVLRGQALIVNSSQPWEPLQLHVDKAVSGLRSLTTLLRALGAQKEAISPPDAASAAPLRTITADTFRKLFRVYSNFLRGKLKLYTGEACRTGDR

SEQ ID NO: 170 - protein, 166 aa, Artificial Sequence
  EPO_372_L81V
APPRLICDSRVLERYLLEAKEAENITTGCAEHCSLNENITVPDTKVNFYAWKRMEVGQQAVEVWQGLALLSEAVLRGQALVVNSSQPWEPLQLHVDKAVSGLRSLTTLLRALGAQKEAISPPDAASAAPLRTITADTFRKLFRVYSNFLRGKLKLYTGEACRTGDR

SEQ ID NO: 171 - protein, 166 aa, Artificial Sequence
  EPO_373_L91I
APPRLICDSRVLERYLLEAKEAENITTGCAEHCSLNENITVPDTKVNFYAWKRMEVGQQAVEVWQGLALLSEAVLRGQALLVNSSQPWEPIQLHVDKAVSGLRSLTTLLRALGAQKEAISPPDAASAAPLRTITADTFRKLFRVYSNFLRGKLKLYTGEACRTGDR

SEQ ID NO: 172 - protein, 166 aa, Artificial Sequence
  EPO_374_L91V
APPRLICDSRVLERYLLEAKEAENITTGCAEHCSLNENITVPDTKVNFYAWKRMEVGQQAVEVWQGLALLSEAVLRGQALLVNSSQPWEPVQLHVDKAVSGLRSLTTLLRALGAQKEAISPPDAASAAPLRTITADTFRKLFRVYSNFLRGKLKLYTGEACRTGDR

SEQ ID NO: 173 - protein, 166 aa, Artificial Sequence
  EPO_375_R103H
APPRLICDSRVLERYLLEAKEAENITTGCAEHCSLNENITVPDTKVNFYAWKRMEVGQQAVEVWQGLALLSEAVLRGQALLVNSSQPWEPLQLHVDKAVSGLHSLTTLLRALGAQKEAISPPDAASAAPLRTITADTFRKLFRVYSNFLRGKLKLYTGEACRTGDR

SEQ ID NO: 174 - protein, 166 aa, Artificial Sequence
  EPO_376_R103Q
APPRLICDSRVLERYLLEAKEAENITTGCAEHCSLNENITVPDTKVNFYAWKRMEVGQQAVEVWQGLALLSEAVLRGQALLVNSSQPWEPLQLHVDKAVSGLQSLTTLLRALGAQKEAISPPDAASAAPLRTITADTFRKLFRVYSNFLRGKLKLYTGEACRTGDR

SEQ ID NO: 175 - protein, 166 aa, Artificial Sequence
  EPO_377_L105I
APPRLICDSRVLERYLLEAKEAENITTGCAEHCSLNENITVPDTKVNFYAWKRMEVGQQAVEVWQGLALLSEAVLRGQALLVNSSQPWEPLQLHVDKAVSGLRSITTLLRALGAQKEAISPPDAASAAPLRTITADTFRKLFRVYSNFLRGKLKLYTGEACRTGDR

SEQ ID NO: 176 - protein, 166 aa, Artificial Sequence
  EPO_378_L105V
APPRLICDSRVLERYLLEAKEAENITTGCAEHCSLNENITVPDTKVNFYAWKRMEVGQQAVEVWQGLALLSEAVLRGQALLVNSSQPWEPLQLHVDKAVSGLRSVTTLLRALGAQKEAISPPDAASAAPLRTITADTFRKLFRVYSNFLRGKLKLYTGEACRTGDR

SEQ ID NO: 177 - protein, 166 aa, Artificial Sequence
  EPO_379_L108I
APPRLICDSRVLERYLLEAKEAENITTGCAEHCSLNENITVPDTKVNFYAWKRMEVGQQAVEVWQGLALLSEAVLRGQALLVNSSQPWEPLQLHVDKAVSGLRSLTTILRALGAQKEAISPPDAASAAPLRTITADTFRKLFRVYSNFLRGKLKLYTGEACRTGDR

SEQ ID NO: 178 - protein, 166 aa, Artificial Sequence
  EPO_380_L108V
APPRLICDSRVLERYLLEAKEAENITTGCAEHCSLNENITVPDTKVNFYAWKRMEVGQQAVEVWQGLALLSEAVLRGQALLVNSSQPWEPLQLHVDKAVSGLRSLTTVLRALGAQKEAISPPDAASAAPLRTITADTFRKLFRVYSNFLRGKLKLYTGEACRTGDR

SEQ ID NO: 179 - protein, 166 aa, Artificial Sequence
  EPO_381_L109I
APPRLICDSRVLERYLLEAKEAENITTGCAEHCSLNENITVPDTKVNFYAWKRMEVGQQAVEVWQGLALLSEAVLRGQALLVNSSQPWEPLQLHVDKAVSGLRSLTTLIRALGAQKEAISPPDAASAAPLRTITADTFRKLFRVYSNFLRGKLKLYTGEACRTGDR

SEQ ID NO: 180 - protein, 166 aa, Artificial Sequence
  EPO_382_L109V
APPRLICDSRVLERYLLEAKEAENITTGCAEHCSLNENITVPDTKVNFYAWKRMEVGQQAVEVWQGLALLSEAVLRGQALLVNSSQPWEPLQLHVDKAVSGLRSLTTLVRALGAQKEAISPPDAASAAPLRTITADTFRKLFRVYSNFLRGKLKLYTGEACRTGDR

SEQ ID NO: 181 - protein, 166 aa, Artificial Sequence
  EPO_383_E117Q
APPRLICDSRVLERYLLEAKEAENITTGCAEHCSLNENITVPDTKVNFYAWKRMEVGQQAVEVWQGLALLSEAVLRGQALLVNSSQPWEPLQLHVDKAVSGLRSLTTLLRALGAQKQAISPPDAASAAPLRTITADTFRKLFRVYSNFLRGKLKLYTGEACRTGDR

SEQ ID NO: 182 - protein, 166 aa, Artificial Sequence
  EPO_384_E117H
APPRLICDSRVLERYLLEAKEAENITTGCAEHCSLNENITVPDTKVNFYAWKRMEVGQQAVEVWQGLALLSEAVLRGQALLVNSSQPWEPLQLHVDKAVSGLRSLTTLLRALGAQKHAISPPDAASAAPLRTITADTFRKLFRVYSNFLRGKLKLYTGEACRTGDR

SEQ ID NO: 183 - protein, 166 aa, Artificial Sequence
  EPO_385_E117N
APPRLICDSRVLERYLLEAKEAENITTGCAEHCSLNENITVPDTKVNFYAWKRMEVGQQAVEVWQGLALLSEAVLRGQALLVNSSQPWEPLQLHVDKAVSGLRSLTTLLRALGAQKNAISPPDAASAAPLRTITADTFRKLFRVYSNFLRGKLKLYTGEACRTGDR

SEQ ID NO: 184 - protein, 166 aa, Artificial Sequence
  EPO_386_F138I
APPRLICDSRVLERYLLEAKEAENITTGCAEHCSLNENITVPDTKVNFYAWKRMEVGQQAVEVWQGLALLSEAVLRGQALLVNSSQPWEPLQLHVDKAVSGLRSLTTLLRALGAQKEAISPPDAASAAPLRTITADTIRKLFRVYSNFLRGKLKLYTGEACRTGDR

SEQ ID NO: 185 - protein, 166 aa, Artificial Sequence
  EPO_387_F138V
APPRLICDSRVLERYLLEAKEAENITTGCAEHCSLNENITVPDTKVNFYAWKRMEVGQQAVEVWQGLALLSEAVLRGQALLVNSSQPWEPLQLHVDKAVSGLRSLTTLLRALGAQKEAISPPDAASAAPLRTITADTVRKLFRVYSNFLRGKLKLYTGEACRTGDR

SEQ ID NO: 186 - protein, 166 aa, Artificial Sequence
  EPO_388_R139H
APPRLICDSRVLERYLLEAKEAENITTGCAEHCSLNENITVPDTKVNFYAWKRMEVGQQAVEVWQGLALLSEAVLRGQALLVNSSQPWEPLQLHVDKAVSGLRSLTTLLRALGAQKEAISPPDAASAAPLRTITADTFHKLFRVYSNFLRGKLKLYTGEACRTGDR

SEQ ID NO: 187 - protein, 166 aa, Artificial Sequence
  EPO_389_R139Q
APPRLICDSRVLERYLLEAKEAENITTGCAEHCSLNENITVPDTKVNFYAWKRMEVGQQAVEVWQGLALLSEAVLRGQALLVNSSQPWEPLQLHVDKAVSGLRSLTTLLRALGAQKEAISPPDAASAAPLRTITADTFQKLFRVYSNFLRGKLKLYTGEACRTGDR

SEQ ID NO: 188 - protein, 166 aa, Artificial Sequence
  EPO_390_K140N
APPRLICDSRVLERYLLEAKEAENITTGCAEHCSLNENITVPDTKVNFYAWKRMEVGQQAVEVWQGLALLSEAVLRGQALLVNSSQPWEPLQLHVDKAVSGLRSLTTLLRALGAQKEAISPPDAASAAPLRTITADTFRNLFRVYSNFLRGKLKLYTGEACRTGDR

SEQ ID NO: 189 - protein, 166 aa, Artificial Sequence
  EPO_391_K140Q
APPRLICDSRVLERYLLEAKEAENITTGCAEHCSLNENITVPDTKVNFYAWKRMEVGQQAVEVWQGLALLSEAVLRGQALLVNSSQPWEPLQLHVDKAVSGLRSLTTLLRALGAQKEAISPPDAASAAPLRTITADTFRQLFRVYSNFLRGKLKLYTGEACRTGDR

SEQ ID NO: 190 - protein, 166 aa, Artificial Sequence
  EPO_392_L141I
APPRLICDSRVLERYLLEAKEAENITTGCAEHCSLNENITVPDTKVNFYAWKRMEVGQQAVEVWQGLALLSEAVLRGQALLVNSSQPWEPLQLHVDKAVSGLRSLTTLLRALGAQKEAISPPDAASAAPLRTITADTFRKIFRVYSNFLRGKLKLYTGEACRTGDR

SEQ ID NO: 191 - protein, 166 aa, Artificial Sequence
  EPO_393_L141V
APPRLICDSRVLERYLLEAKEAENITTGCAEHCSLNENITVPDTKVNFYAWKRMEVGQQAVEVWQGLALLSEAVLRGQALLVNSSQPWEPLQLHVDKAVSGLRSLTTLLRALGAQKEAISPPDAASAAPLRTITADTFRKVFRVYSNFLRGKLKLYTGEACRTGDR

SEQ ID NO: 192 - protein, 166 aa, Artificial Sequence
  EPO_394_F142I
APPRLICDSRVLERYLLEAKEAENITTGCAEHCSLNENITVPDTKVNFYAWKRMEVGQQAVEVWQGLALLSEAVLRGQALLVNSSQPWEPLQLHVDKAVSGLRSLTTLLRALGAQKEAISPPDAASAAPLRTITADTFRKLIRVYSNFLRGKLKLYTGEACRTGDR

SEQ ID NO: 193 - protein, 166 aa, Artificial Sequence
  EPO_395_F142V
APPRLICDSRVLERYLLEAKEAENITTGCAEHCSLNENITVPDTKVNFYAWKRMEVGQQAVEVWQGLALLSEAVLRGQALLVNSSQPWEPLQLHVDKAVSGLRSLTTLLRALGAQKEAISPPDAASAAPLRTITADTFRKLVRVYSNFLRGKLKLYTGEACRTGDR

SEQ ID NO: 194 - protein, 166 aa, Artificial Sequence
  EPO_396_F148I
APPRLICDSRVLERYLLEAKEAENITTGCAEHCSLNENITVPDTKVNFYAWKRMEVGQQAVEVWQGLALLSEAVLRGQALLVNSSQPWEPLQLHVDKAVSGLRSLTTLLRALGAQKEAISPPDAASAAPLRTITADTFRKLFRVYSNILRGKLKLYTGEACRTGDR

SEQ ID NO: 195 - protein, 166 aa, Artificial Sequence
  EPO_397_F148V
APPRLICDSRVLERYLLEAKEAENITTGCAEHCSLNENITVPDTKVNFYAWKRMEVGQQAVEVWQGLALLSEAVLRGQALLVNSSQPWEPLQLHVDKAVSGLRSLTTLLRALGAQKEAISPPDAASAAPLRTITADTFRKLFRVYSNVLRGKLKLYTGEACRTGDR

SEQ ID NO: 196 - protein, 166 aa, Artificial Sequence
  EPO_398_L149I
APPRLICDSRVLERYLLEAKEAENITTGCAEHCSLNENITVPDTKVNFYAWKRMEVGQQAVEVWQGLALLSEAVLRGQALLVNSSQPWEPLQLHVDKAVSGLRSLTTLLRALGAQKEAISPPDAASAAPLRTITADTFRKLFRVYSNFIRGKLKLYTGEACRTGDR

SEQ ID NO: 197 - protein, 166 aa, Artificial Sequence
  EPO_399_L149V
APPRLICDSRVLERYLLEAKEAENITTGCAEHCSLNENITVPDTKVNFYAWKRMEVGQQAVEVWQGLALLSEAVLRGQALLVNSSQPWEPLQLHVDKAVSGLRSLTTLLRALGAQKEAISPPDAASAAPLRTITADTFRKLFRVYSNFVRGKLKLYTGEACRTGDR

SEQ ID NO: 198 - protein, 166 aa, Artificial Sequence
  EPO_400_L153I
APPRLICDSRVLERYLLEAKEAENITTGCAEHCSLNENITVPDTKVNFYAWKRMEVGQQAVEVWQGLALLSEAVLRGQALLVNSSQPWEPLQLHVDKAVSGLRSLTTLLRALGAQKEAISPPDAASAAPLRTITADTFRKLFRVYSNFLRGKIKLYTGEACRTGDR

SEQ ID NO: 199 - protein, 166 aa, Artificial Sequence
  EPO_401_L153V
APPRLICDSRVLERYLLEAKEAENITTGCAEHCSLNENITVPDTKVNFYAWKRMEVGQQAVEVWQGLALLSEAVLRGQALLVNSSQPWEPLQLHVDKAVSGLRSLTTLLRALGAQKEAISPPDAASAAPLRTITADTFRKLFRVYSNFLRGKVKLYTGEACRTGDR

SEQ ID NO: 200 - protein, 166 aa, Artificial Sequence
  EPO_402_Y156H
APPRLICDSRVLERYLLEAKEAENITTGCAEHCSLNENITVPDTKVNFYAWKRMEVGQQAVEVWQGLALLSEAVLRGQALLVNSSQPWEPLQLHVDKAVSGLRSLTTLLRALGAQKEAISPPDAASAAPLRTITADTFRKLFRVYSNFLRGKLKLHTGEACRTGDR

SEQ ID NO: 201 - protein, 166 aa, Artificial Sequence
  EPO_403_Y156I
APPRLICDSRVLERYLLEAKEAENITTGCAEHCSLNENITVPDTKVNFYAWKRMEVGQQAVEVWQGLALLSEAVLRGQALLVNSSQPWEPLQLHVDKAVSGLRSLTTLLRALGAQKEAISPPDAASAAPLRTITADTFRKLFRVYSNFLRGKLKLITGEACRTGDR

SEQ ID NO: 202 - protein, 192 aa, Macaca mulatta
  Rhesus macaque EPO
MGVHECPAWLWLLLSLVSLPLGLPVPGAPPRLVCDSRVLERYLLEAKEAENVTMGCSESCSLNENITVPDTKVNFYAWKRIEVGQQAVEVWQGLALLSEAVLRGQAVLANSSQPFEPLQLHMDKAISGLRSITTLLRALGAQEAISLPDAASAAPLRTITADTFCKLFRVYSNFLRGKLKLYTGEACRRGDR

SEQ ID NO: 203 - protein, 192 aa, Mus musculus
  Mouse EPO
MGVPERPTLLLLLSLLLIPLGLPVLCAPPRLICDSRVLERYILEAKEAENVTMGCAEGPRLSENITVPDTKVNFYAWKRMEVEEQAIEVWQGLSLLSEAILQAQALLANSSQPPETLQLHIDKAISGLRSLTSLLRVLGAQKELMSPPDTTPPAPLRTLTVDTFCKLFRVYANFLRGKLKLYTGEVCRRGDR

SEQ ID NO: 204 - protein, 192 aa, Rattus norvegicus
  Rat EPO
MGVPERPTLLLLLSLLLIPLGLPVLCAPPRLICDSRVLERYILEAKEAENVTMGCAEGPRLSENITVPDTKVNFYAWKRMKVEEQAVEVWQGLSLLSEAILQAQALQANSSQPPESLQLHIDKAISGLRSLTSLLRVLGAQKELMSPPDATQAAPLRTLTADTFCKLFRVYSNFLRGKLKLYTGEACRRGDR

SEQ ID NO: 205 - protein, 194 aa, Sus scrofa
  Pig EPO
MGARECPARLLLLSLLLLPLGLPVLGAPPRLICDSRVLERYILEAKEGENATMGCAESCSFSENITVPDTKVNFYAWKRMEVQQQAMEVWQGLALLSEAILQGQALLANSSQPSEALQLHVDKAVSGLRSLTSLLRALGAQKEAIPLPDASPSSATPLRTFAVDTLCKLFRNYSNFLRGKLTLYTGEACRRRDR

SEQ ID NO: 206 - protein, 206 aa, Canis familiaris
  Dog EPO
MCEPAPPKPTQSAWHSFPECPALLLLLSLLLLPLGLPVLGAPPRLICDSRVLERYILEAREAENVTMGCAQGCSFSENITVPDTKVNFYTWKRMDVGQQALEVWQGLALLSEAILRGQALLANASQPSETPQLHVDKAVSSLRSLTSLLRALGAQKEAMSLPEEASPAPLRTFTVDTLCKLFRIYSNFLRGKLTLYTGEACRRGDR

SEQ ID NO: 207 - protein, 192 aa, Felis silvestris catus
  Cat EPO
MGSCECPALLLLLSLLLLPLGLPVLGAPPRLICDSRVLERYILGAREAENVTMGCAEGCSFSENITVPDTKVNFYTWKRMDVGQQAVEVWQGLALLSEAILRGQALLANSSQPSETLQLHVDKAVSSLRSLTSLLRALGAQKEATSLPEATSAAPLRTFTVDTLCKLFRIYSNFLRGKLTLYTGEACRRGDR

SEQ ID NO: 208 - protein, 195 aa, Oryctolagus cuniculus
  Rabbit EPO
MGVRGRLALLPLALLCLLVLALGLPVLGAPARLICDSRVLERYILEAKEAENVTMGCAEGCSLGENITVPDTKVNFHHWKKSEAGRHAVEVWQGLALLSEAMLRSQALLANSSQLPETLQVHVDKAVSGLRSLTSLLRALGVQKEAVSPPEAASSAAPLRTVAADTLCKLFRIYSNFLRGKLKLYTGEACRRGDR

SEQ ID NO: 209 - protein, 192 aa, Bos taurus
  Bovine EPO
MGARDCTPLLMLSFLLFPLGFPVLGAPARLICDSRVLERYILEAREAENATMGCAEGCSFNENITVPDTKVNFYAWKRMEVQQQALEVWQGLALLSEAILRGQALLANASQPCEALRLHVDKAVSGLRSLTSLLRALGAQKEAISLPDATPSAAPLRAFTVDALSKLFRIYSNFLRGKLTLYTGEACRRGDR

SEQ ID NO: 210 - protein, 192 aa, Equus caballus
  Horse EPO
MGVRECPALLLLLSLLLPPLGLPALGAPPRLICDSRVLERYILEAREAENVTMGCAEGCSFGENVTVPDTKVNFYSWKRMEVEQQAVEVWQGLALLSEAILQGQALLANSSQPSETLRLHVDKAVSSLRSLTSLLRALGAQKEAISPPDAASAAPLRTFAVDTLCKLFRIYSNFLRGKLKLYTGEACRRGDR

SEQ ID NO: 211 - protein, 194 aa, Ovis aries
  Sheep EPO
MGARDCTPLLLLLLSFLLFPLGLPVLGAPPRLICDSRVLERYILEAREAENATMGCAEGCSFSENITVPDTKVNFYAWKRMEVQQQALEVWQGLALLSEAIFRGQALLANASQPCEALRLHVDKAVSGLRSLTSLLRALGAQKEAIPLPDATPSAAPLRIFTVDALSKLFRIYSNFLRGKLTLYTGEACRRGDR

SEQ ID NO: 212 - protein, 133 aa, Pan troglodytes
  Chimpanzee EPO (fragment)
SRVLERYLLEAKEAENITTGCAEHCSLNENITVPDTKVNFYAWKRMEVGQQAVEVWQGLALLSEAVLRGQALLVNSSQPLEPLQLHVDKAVSGLRSLTTLLRALGAQKEAISPPDAASAAPLRTITADTFRKL

SEQ ID NO: 213 - protein, 183 aa, Danio rerio
  Zebrafish EPO
MFHGSGLFALLLMVLEWTRPGLSSPLRPICDLRVLDHFIKEAWDAEAAMRTCKDDCSIATNVTVPLTRVDFEVWEAMNIEEQAQEVQSGLHMLNEAIGSLQISNQTEVLQSHIDASIRNIASIRQVLRSLSIPEYVPPTSSGEDKETQKISSISELFQVHVNFLRGKARLLLANAPVCRQGVS

SEQ ID NO: 214 - protein, 185 aa, Takifugu rubripes
  Japanese pufferfish EPO
MLQKTGRGLLAFLLIVLEWTQPSLPSPLRPICDLRVLNHFIKEAQDAEAAMKLCSEGCTLSDSVIVPQTTVEFDVWEKKSALAKAQEVQSGLWLLQEAFNFLRTSVTNTALHSHIDNSVRNLLSVNAVLRSLNIQEFTPPASAAEIEGTWRVSTATELLQVHINFLRGKVRLILLDAQACQQDVS

SEQ ID NO: 215 - protein, 192 aa, Macaca fascicularis
  Crab eating macaque (Cynomolgus monkey) EPO
MGVHECPAWLWLLLSLVSLPLGLPVPGAPPRLICDSRVLERYLLEAKEAENVTMGCSESCSLNENITVPDTKVNFYAWKRMEVGQQAVEVWQGLALLSEAVLRGQAVLANSSQPFEPLQLHMDKAISGLRSITTLLRALGAQEAISLPDAASAAPLRTITADTFCKLFRVYSNFLRGKLKLYTGEACRRGDR

SEQ ID NO: 216 - protein, 152 aa, Oryzias melastigma
  Indian medaka EPO (fragment)
PRVLKHFIQEAQDAEVAMRSCREGCGLSQTVSVPQTTVNYDDWEKKDGLEKAQEVQTGLWLLQQALDLLGPSVTNTALNNHIDNTVRNLVSINAVLRSLNFQEYTPPTNVTSLDGTWRVSSATELLQVHVNFLRGKVGLLLSGAPACQHNVS

SEQ ID NO: 217 - protein, 182 aa, Cyprinus carpio
  Common carp EPO-I
MQITRLFALLLMVLEWTRPGLSSPLRPICDLRVLDHFIKEAWDAEAAMRACKDACSIATNFTVPLTRVDFDVWEAMNIEERAQEVQSGLHVLNEAISSLQASNQTDVLQSHVDASISNIASIRQVLRSLSIPEYVPPTSGGEDKEMQIVSSISELFQVHINFLRGKVRLLTRSAPICHQGVS

SEQ ID NO: 218 - protein, 136 aa, Oncorhynchus mykiss
  Rainbow trout EPO (fragment)
ICDLSVLNHFIKEAWDAEAAMRACKDACSIATNFTVPLTRVDFDVWEAMNIEERAQEVQSGLHVLNEAISSLQASNQTDVLQSHIDASISNIASIRQVLRSLSIPEYVPPTSGGEDKEMQIVSSISELFQVHINFL

SEQ ID NO: 219 - protein, 183 aa, Cyprinus carpio
  Common carp EPO
MFHGSGLFALLLIVLEWTRPGLSSPLRPICDLRVLDHFIKEAWDAEAAMRACKDACSIATNFTVPLTRVDFDVWEAMNIEERAQEVQSGLHVLNEAISSLQASNQTDVLQSHIDASISNIASIRQVLRSLSIPEYVPPTSGGEDKEMQIVSSISELFQVHINFLRGKVRLLLANAPVCHQGVS

SEQ ID NO: 220 - protein, 185 aa, Epinephelus coioides
  Orange-spotted grouper EPO
MLQKRGRGLLVLLLMLLEWTRPGLLSPLRPICDLRVLNHFIKEARDAEVAMKSCTEGCSLSESVTVPQTRVDFDVWEKKNGLEQAQEVQSGLWLLQQALNLLRTSVTNTALHSHIDNSIRNLLSINAVLRSLNIQEYTPPASTVALEGTWRVSSATDLLQVHVNFLRGKVRLLLLDAQACQQDVS

SEQ ID NO: 221 - protein, 192 aa, Spalax galili
  Mole rat EPO precursor
MGVPDCLALPLLVTFLLLSLGLPVLGAPPRLICDSRVLERYILEAKEAENITMGCAEGPRFNENFTVPDTKVNFYAWKTMGVEEQAVEVWQGLSLLFEAILRAQAVLANSSQPSEMLQLHVDKAISGLRSLTSLLRALGAQKEAISPPDTTQVIPLRRFTVDTFCKLFRIYSNFLRGKLKLYTGEACRRGDR

SEQ ID NO: 222 - protein, 192 aa, Spalax judaei; identical to SEQ ID NO: 221
  Blind subterranean mole rat EPO precursor

SEQ ID NO: 223 - protein, 195 aa, Tetraodon nigroviridis
  Green puffer EPO
MGLLMCVCVVVFVSGMTGLLAFLLIVLEWTRPSLPSPLRPICDLRVLNHFIKEAQDAEAAMKTCREGCTLSESVVVPQTTVDFDVWEKKNASAKAEEVQSGLWLLQQAFNFLRTSVTNAALHSHIDNAVRNLLSVNAVLRSLNIQEFTPQANGAEIEGTWRASSAAELLQVYVNFLRGKARLLLLDAQACQQDVS

SEQ ID NO: 224 - protein, 133 aa, Saguinus oedipus
  Cotton-top tamarin EPO (fragment)
SGVLERYVLEGKEAENVTMGCAESCSLNENITVPDTKVNFYAWKKMEFGQQAVDVWQGLTLLSEAVLRGQALLANSTQPREPLQLHMDRAVSGLRSLTTLLRALGAQEATSPPDAAPSAVPLQTITADTFSKL

SEQ ID NO: 225 - protein, 131 aa, Pongo pygmaeus
  Orangutan EPO (fragment)
SRVLERYLLEAKEAENTGCAEHCSLSENITVPDTKVNFYAWKRMEVGQQALEVWQGLALLSEAVLRGQALLVNSSQPWEPLQLHVDKAVSGLRSLTTLLRALGAQKEASSPPDAALAAPLRTITADTFRKF

SEQ ID NO: 226 - protein, 133 aa, Gorilla gorilla
  Gorilla EPO (fragment)
SRVLERYLLEAKEAENITTGCAEHCSLNENITVPDTKVNFYAWKRMEVRQQAVEVWQGLALLSEAVLRGQALLVNSSQPWEPLQLHVDKAVSGLRSLTTLLRALGAQKEAISPPDAASAAPLRTITADTFRKL

SEQ ID NO: 227 - protein, 193 aa, Artificial Sequence
  Amgen ARANESP immature
MGVHECPAWLWLLLSLLSLPLGLPVLGAPPRLICDSRVLERYLLEAKEAENITTGCNETCSLNENITVPDTKVNFYAWKRMEVGQQAVEVWQGLALLSEAVLRGQALLVNSSQVNETLQLHVDKAVSGLRSLTTLLRALGAQKEAISPPDAASAAPLRTITADTFRKLFRVYSNFLRGKLKLYTGEACRTGDR

SEQ ID NO: 228 - protein, 166 aa, Artificial Sequence
  Amgen ARANESP mature
APPRLICDSRVLERYLLEAKEAENITTGCNETCSLNENITVPDTKVNFYAWKRMEVGQQAVEVWQGLALLSEAVLRGQALLVNSSQVNETLQLHVDKAVSGLRSLTTLLRALGAQKEAISPPDAASAAPLRTITADTFRKLFRVYSNFLRGKLKLYTGEACRTGDR

SEQ ID NO: 229 - DNA, 339 bp, Homo sapiens
  coding sequence of human erythropoietin
atggaggtcgggcagcaggccgtagaagtctggcagggcctggccctgctgtcggaagctgtcctgcggggccaggccctgttggtcaactcttcccagccgtgggagcccctgcagctgcatgtggataaagccgtcagtggccttcgcagcctcaccactctgcttcgggctctgggagcccagaaggaagccatctcccctccagatgcggcctcagctgctccactccgaacaatcactgctgacactttccgcaaactcttccgagtctactccaatttcctccggggaaagctgaagctgtacacaggggaggcctgcaggacaggggacaga

SEQ ID NO: 230 - DNA, 4020 bp, Artificial Sequence
  pcDNA3.1/GS
gacggatcgggagatctcccgatcccctatggtcgactctcagtacaatctgctctgatgccgcatagttaagccagtatctgctccctgcttgtgtgttggaggtcgctgagtagtgcgcgagcaaaatttaagctacaacaaggcaaggcttgaccgacaattgcatgaagaatctgcttagggttaggcgttttgcgctgcttcgcgatgtacgggccagatatacgcgttgacattgattattgactagttattaatagtaatcaattacggggtcattagttcatagcccatatatggagttccgcgttacataacttacggtaaatggcccgcctggctgaccgcccaacgacccccgcccattgacgtcaataatgacgtatgttcccatagtaacgccaatagggactttccattgacgtcaatgggtggactatttacggtaaactgcccacttggcagtacatcaagtgtatcatatgccaagtacgccccctattgacgtcaatgacggtaaatggcccgcctggcattatgcccagtacatgaccttatgggactttcctacttggcagtacatctacgtattagtcatcgctattaccatggtgatgcggttttggcagtacatcaatgggcgtggatagcggtttgactcacggggatttccaagtctccaccccattgacgtcaatgggagtttgttttggcaccaaaatcaacgggactttccaaaatgtcgtaacaactccgccccattgacgcaaatgggcggtaggcgtgtacggtgggaggtctatataagcagagctctctggctaactagagaacccactgcttactggcttatcgaaattaatacgactcactatagggagacccaagctggctagttaagctcgcccttaagggcgagcttcgaggtcacccattcgaaggtaagcctatccctaaccctctcctcggtctcgattctacgcgtaccggtcatcatcaccatcaccattgagtttaaacccgctgatcagcctcgactgtgccttctagttgccagccatctgttgtttgcccctcccccgtgccttccttgaccctggaaggtgccactcccactgtcctttcctaataaaatgaggaaattgcatcgcattgtctgagtaggtgtcattctattctggggggtggggtggggcaggacagcaagggggaggattgggaagacaatagcaggcatgctggggatgcggtgggctctatggcttctgaggcggaaagaaccagctggggctctagggggtatccccacgcgccctgtagcggcgcattaagcgcggcgggtgtggtggttacgcgcagcgtgaccgctacacttgccagcgccctagcgcccgctcctttcgctttcttcccttcctttctcgccacgttcgccggctttccccgtcaagctctaaatcggggcatccctttagggttccgatttagtgctttacggcacctcgaccccaaaaaacttgattagggtgatggttcacgtagtgggccatcgccctgatagacggtttttcgccctttgacgttggagtccacgttctttaatagtggactcttgttccaaactggaacaacactcaaccctatctcggtctattcttttgatttataagggattttggggatttcggcctattggttaaaaaatgagctgatttaacaaaaatttaacgcgaattaattctgtggaatgtgtgtcagttagggtgtggaaagtccccaggctccccaggcaggcagaagtatgcaaagcatgcatctcaattagtcagcaaccaggtgtggaaagtccccaggctccccagcaggcagaagtatgcaaagcatgcatctcaattagtcagcaaccatagtcccgcccctaactccgcccatcccgcccctaactccgcccagttccgcccattctccgccccatggctgactaattttttttatttatgcagaggccgaggccgcctctgcctctgagctattccagaagtagtgaggaggcttttttggaggcctaggcttttgcaaaaagctcccgggagcttgtatatccattttcggatctgatcagcacgtgttgacaattaatcatcggcatagtatatcggcatagtataatacgacaaggtgaggaactaaaccatggccaagttgaccagtgccgttccggtgctcaccgcgcgcgacgtcgccggagcggtcgagttctggaccgaccggctcgggttctcccgggacttcgtggaggacgacttcgccggtgtggtccgggacgacgtgaccctgttcatcagcgcggtccaggaccaggtggtgccggacaacaccctggcctgggtgtgggtgcgcggcctggacgagctgtacgccgagtggtcggaggtcgtgtccacgaacttccgggacgcctccgggccggccatgaccgagatcggcgagcagccgtgggggcgggagttcgccctgcgcgacccggccggcaactgcgtgcacttcgtggccgaggagcaggactgacacgtgctacgagatttcgattccaccgccgccttctatgaaaggttgggcttcggaatcgttttccgggacgccggctggatgatcctccagcgcggggatctcatgctggagttcttcgcccaccccaacttgtttattgcagcttataatggttacaaataaagcaatagcatcacaaatttcacaaataaagcatttttttcactgcattctagttgtggtttgtccaaactcatcaatgtatcttatcatgtctgtataccgtcgacctctagctagagcttggcgtaatcatggtcatagctgtttcctgtgtgaaattgttatccgctcacaattccacacaacatacgagccggaagcataaagtgtaaagcctggggtgcctaatgagtgagctaactcacattaattgcgttgcgctcactgcccgctttccagtcgggaaacctgtcgtgccagctgcattaatgaatcggccaacgcgcggggagaggcggtttgcgtattgggcgctcttccgcttcctcgctcactgactcgctgcgctcggtcgttcggctgcggcgagcggtatcagctcactcaaaggcggtaatacggttatccacagaatcaggggataacgcaggaaagaacatgtgagcaaaaggccagcaaaaggccaggaaccgtaaaaaggccgcgttgctggcgtttttccataggctccgcccccctgacgagcatcacaaaaatcgacgctcaagtcagaggtggcgaaacccgacaggactataaagataccaggcgtttccccctggaagctccctcgtgcgctctcctgttccgaccctgccgcttaccggatacctgtccgcctttctcccttcgggaagcgtggcgctttctcaatgctcacgctgtaggtatctcagttcggtgtaggtcgttcgctccaagctgggctgtgtgcacgaaccccccgttcagcccgaccgctgcgccttatccggtaactatcgtcttgagtccaacccggtaagacacgacttatcgccactggcagcagccactggtaacaggattagcagagcgaggtatgtaggcggtgctacagagttcttgaagtggtggcctaactacggctacactagaaggacagtatttggtatctgcgctctgctgaagccagttaccttcggaaaaagagttggtagctcttgatccggcaaacaaaccaccgctggtagcggtggtttttttgtttgcaagcagcagattacgcgcagaaaaaaaggatctcaagaagatcctttgatcttttctacggggtctgacgctcagtggaacgaaaactcacgttaagggattttggtcatgagcggatacatatttgaatgtatttagaaaaataaacaaataggggttccgcgcacatttccccgaaaagtgccacctgacgtc

SEQ ID NO: 231 - DNA, 38 bp, Artificial Sequence
  EPO BamHI forward primer
gggaattccatatgggggtgcacgaatgtcctgcctgg

SEQ ID NO: 232 - DNA, 37 bp, Artificial Sequence
  EPO NdeI reverse primer
cgggatcctcatctgtcccctgtcctgcaggcctccc

SEQ ID NO: 233 - DNA, 3889 bp, Artificial Sequence
  pNAUT-EPO
gcgcccaatacgcaaaccgcctctccccgcgcgttggccgattcattaatgcagctgctaggggttccttgtagttaatgattaacccgccatgctacttatctactatgccaagtacgccccctattgacgtcaatgacggtaaatggcccgcctggcattatgcccagtacatgaccttatgggactttcctacttggcagtacatctacgtattagtcatcgctattaccatggtgatgcggttttggcagtacatcaatgggcgtggatagcggtttgactcacggggatttccaagtctccaccccattgacgtcaatgggagtttgttttggcaccaaaatcaacgggactttccaaaatgtcgtaacaactccgccccattgacgcaaatgggcggtaggcgtgtacggtgggaggtctatataagcagagctctctggctaactagagaacccactgcttactggcttatcgaaattaatacgactcactatagggagacccaagcttggtaccgagctcggatccactagtaacggccgccagtgtgctggaattctgcagatatccatcacactggcggccgcgaattcgcccttgggaattccatatgggggtgcacgaatgtcctgcctggctgtggcttctcctgtccctgctgtcgctccctctgggcctcccagtcctgggcgccccaccacgcctcatctgtgacagccgagtcctggagaggtacctcttggaggccaaggaggccgagaatatcacgacgggctgtgctgaacactgcagcttgaatgagaatatcactgtcccagacaccaaagttaatttctatgcctggaagaggatggaggtcgggcagcaggccgtagaagtctggcagggcctggccctgctgtcggaagctgtcctgcggggccaggccctgttggtcaactcttcccagccgtgggagcccctgcagctgcatgtggataaagccgtcagtggccttcgcagcctcaccactctgcttcgggctctgggagcccagaaggaagccatctcccctccagatgcggcctcagctgctccactccgaacaatcactgctgacactttccgcaaactcttccgagtctactccaatttcctccggggaaagctgaagctgtacacaggggaggcctgcaggacaggggacagatgaggatcccgaagggcgaattcgtttaaacctgcaggactagagggccctattctatagtgtcacctaaatgctagagctcgctgatcagcctcgactgtgccttctagttgccagccatctgttgtttgcccctcccccgtgccttccttgaccctggaaggtgccactcccactgtcctttcctaataaaatgaggaaattgcatcgcattgtctgagtaggtgtcattctattctggggggtggggtggggcaggacagcaagggggaggattgggaagacaatagcaggcatgctggggatgcggtgggctctatggcttctgaggcggaaagaaccaggtagataagtagcatggcgggttaatcattaactacacagctggcgtaatagcgaagaggcccgcaccgatcgcccttcccaacagttgcgcagcctgaatggcgaatggcgcctgatgcggtattttctccttacgcatctgtgcggtatttcacaccgcatatggtgcactctcagtacaatctgctctgatgccgcatagttaagccagccccgacacccgccaacacccgctgacgcgccctgacgggcttgtctgctcccggcatccgcttacagacaagctgtgaccgtctccgggagctgcatgtgtcagaggttttcaccgtcatcaccgaaacgcgcgagacgaaagggcctcgtgatacgcctatttttataggttaatgtcatgataataatggtttcttagacgtcaggtggcacttttcggggaaatgtgcgcggaacccctatttgtttatttttctaaatacattcaaatatgtatccgctcatgagacaataaccctgataaatgcttcaataatattgaaaaaggaagagtatgagtattcaacatttccgtgtcgcccttattcccttttttgcggcattttgccttcctgtttttgctcacccagaaacgctggtgaaagtaaaagatgctgaagatcagttgggtgcacgagtgggttacatcgaactggatctcaacagcggtaagatccttgagagttttcgccccgaagaacgttttccaatgatgagcacttttaaagttctgctatgtggcgcggtattatcccgtattgacgccgggcaagagcaactcggtcgccgcatacactattctcagaatgacttggttgagtactcaccagtcacagaaaagcatcttacggatggcatgacagtaagagaattatgcagtgctgccataaccatgagtgataacactgcggccaacttacttctgacaacgatcggaggaccgaaggagctaaccgcttttttgcacaacatgggggatcatgtaactcgccttgatcgttgggaaccggagctgaatgaagccataccaaacgacgagcgtgacaccacgatgcctgtagcaatggcaacaacgttgcgcaaactattaactggcgaactacttactctagcttcccggcaacaattaatagactggatggaggcggataaagttgcaggaccacttctgcgctcggcccttccggctggctggtttattgctgataaatctggagccggtgagcgtgggtctcgcggtatcattgcagcactggggccagatggtaagccctcccgtatcgtagttatctacacgacggggagtcaggcaactatggatgaacgaaatagacagatcgctgagataggtgcctcactgattaagcattggtaactgtcagaccaagtttactcatatatactttagattgatttaaaacttcatttttaatttaaaaggatctaggtgaagatcctttttgataatctcatgaccaaaatcccttaacgtgagttttcgttccactgagcgtcagaccccgtagaaaagatcaaaggatcttcttgagatcctttttttctgcgcgtaatctgctgcttgcaaacaaaaaaaccaccgctaccagcggtggtttgtttgccggatcaagagctaccaactctttttccgaaggtaactggcttcagcagagcgcagataccaaatactgtccttctagtgtagccgtagttaggccaccacttcaagaactctgtagcaccgcctacatacctcgctctgctaatcctgttaccagtggctgctgccagtggcgataagtcgtgtcttaccgggttggactcaagacgatagttaccggataaggcgcagcggtcgggctgaacggggggttcgtgcacacagcccagcttggagcgaacgacctacaccgaactgagatacctacagcgtgagctatgagaaagcgccacgcttcccgaagggagaaaggcggacaggtatccggtaagcggcagggtcggaacaggagagcgcacgagggagcttccagggggaaacgcctggtatctttatagtcctgtcgggtttcgccacctctgacttgagcgtcgatttttgtgatgctcgtcaggggggcggagcctatggaaaaacgccagcaacgcggcctttttacggttcctggccttttgctggccttttgctcacatgttctttcctgcgttatcccctgattctgtggataaccgtattaccgcctttgagtgagctgataccgctcgccgcagccgaacgaccgagcgcagcgagtcagtgagcgaggaagcggaaga

SEQ ID NO: 234 - DNA, 18 bp, Artificial Sequence
  pNAUT forward primer
tataagcagagctctctg

SEQ ID NO: 235 - DNA, 19 bp, Artificial Sequence
  pNAUT reverse primer
cacagtcgaggctgatcag

SEQ ID NO: 236 - protein, 192 aa, Homo sapiens
  EPO immature form deltaR193
MGVHECPAWLWLLLSLLSLPLGLPVLGAPPRLICDSRVLERYLLEAKEAENITTGCAEHCSLNENITVPDTKVNFYAWKRMEVGQQAVEVWQGLALLSEAVLRGQALLVNSSQPWEPLQLHVDKAVSGLRSLTTLLRALGAQKEAISPPDAASAAPLRTITADTFRKLFRVYSNFLRGKLKLYTGEACRTGD

SEQ ID NO: 237 - protein, 165 aa, Homo sapiens
  Human EPO - mature deltaR166
APPRLICDSRVLERYLLEAKEAENITTGCAEHCSLNENITVPDTKVNFYAWKRMEVGQQAVEVWQGLALLSEAVLRGQALLVNSSQPWEPLQLHVDKAVSGLRSLTTLLRALGAQKEAISPPDAASAAPLRTITADTFRKLFRVYSNFLRGKLKLYTGEACRTGD

SEQ ID NO: 238 - protein, 193 aa, Homo sapiens
  Human EPO D70S variant- immature
MGVHECPAWLWLLLSLLSLPLGLPVLGAPPRLICDSRVLERYLLEAKEAENITTGCAEHCSLNENITVPSTKVNFYAWKRMEVGQQAVEVWQGLALLSEAVLRGQALLVNSSQPWEPLQLHVDKAVSGLRSLTTLLRALGAQKEAISPPDAASAAPLRTITADTFRKLFRVYSNFLRGKLKLYTGEACRTGDR

SEQ ID NO: 239 - protein, 166 aa, Homo sapiens
  Human EPO D70S (D43S) - mature
APPRLICDSRVLERYLLEAKEAENITTGCAEHCSLNENITVPSTKVNFYAWKRMEVGQQAVEVWQGLALLSEAVLRGQALLVNSSQPWEPLQLHVDKAVSGLRSLTTLLRALGAQKEAISPPDAASAAPLRTITADTFRKLFRVYSNFLRGKLKLYTGEACRTGDR

SEQ ID NO: 240 - protein, 193 aa, Homo sapiens
  Human EPO G104S - immature
MGVHECPAWLWLLLSLLSLPLGLPVLGAPPRLICDSRVLERYLLEAKEAENITTGCAEHCSLNENITVPDTKVNFYAWKRMEVGQQAVEVWQGLALLSEAVLRSQALLVNSSQPWEPLQLHVDKAVSGLRSLTTLLRALGAQKEAISPPDAASAAPLRTITADTFRKLFRVYSNFLRGKLKLYTGEACRTGDR

SEQ ID NO: 241 - protein, 166 aa, Homo sapiens
  Human EPO G104S(G77S) - mature
APPRLICDSRVLERYLLEAKEAENITTGCAEHCSLNENITVPDTKVNFYAWKRMEVGQQAVEVWQGLALLSEAVLRSQALLVNSSQPWEPLQLHVDKAVSGLRSLTTLLRALGAQKEAISPPDAASAAPLRTITADTFRKLFRVYSNFLRGKLKLYTGEACRTGDR

SEQ ID NO: 242 - protein, 193 aa, Homo sapiens
  Human EPO S147C - immature
MGVHECPAWLWLLLSLLSLPLGLPVLGAPPRLICDSRVLERYLLEAKEAENITTGCAEHCSLNENITVPDTKVNFYAWKRMEVGQQAVEVWQGLALLSEAVLRGQALLVNSSQPWEPLQLHVDKAVSGLRSLTTLLRALGAQKEAICPPDAASAAPLRTITADTFRKLFRVYSNFLRGKLKLYTGEACRTGDR

SEQ ID NO: 243 - protein, 166 aa, Homo sapiens
  Human EPO S147C(S120C) - mature
APPRLICDSRVLERYLLEAKEAENITTGCAEHCSLNENITVPDTKVNFYAWKRMEVGQQAVEVWQGLALLSEAVLRGQALLVNSSQPWEPLQLHVDKAVSGLRSLTTLLRALGAQKEAICPPDAASAAPLRTITADTFRKLFRVYSNFLRGKLKLYTGEACRTGDR

SEQ ID NO: 244 - protein, 166 aa, Homo sapiens
  EPO N24H
APPRLICDSRVLERYLLEAKEAEHITTGCAEHCSLNENITVPDTKVNFYAWKRMEVGQQAVEVWQGLALLSEAVLRGQALLVNSSQPWEPLQLHVDKAVSGLRSLTTLLRALGAQKEAISPPDAASAAPLRTITADTFRKLFRVYSNFLRGKLKLYTGEACRTGDR

SEQ ID NO: 245 - protein, 166 aa, Homo sapiens
  EPO N38H
APPRLICDSRVLERYLLEAKEAENITTGCAEHCSLNEHITVPDTKVNFYAWKRMEVGQQAVEVWQGLALLSEAVLRGQALLVNSSQPWEPLQLHVDKAVSGLRSLTTLLRALGAQKEAISPPDAASAAPLRTITADTFRKLFRVYSNFLRGKLKLYTGEACRTGDR

SEQ ID NO: 246 - protein, 166 aa, Homo sapiens
  EPO N83H
APPRLICDSRVLERYLLEAKEAENITTGCAEHCSLNENITVPDTKVNFYAWKRMEVGQQAVEVWQGLALLSEAVLRGQALLVHSSQPWEPLQLHVDKAVSGLRSLTTLLRALGAQKEAISPPDAASAAPLRTITADTFRKLFRVYSNFLRGKLKLYTGEACRTGDR

SEQ ID NO: 247 - protein, 166 aa, Homo sapiens
  EPO N38H/R139H
APPRLICDSRVLERYLLEAKEAENITTGCAEHCSLNEHITVPDTKVNFYAWKRMEVGQQAVEVWQGLALLSEAVLRGQALLVNSSQPWEPLQLHVDKAVSGLRSLTTLLRALGAQKEAISPPDAASAAPLRTITADTFHKLFRVYSNFLRGKLKLYTGEACRTGDR

SEQ ID NO: 248 - protein, 166 aa, Homo sapiens
  EPO N38H/R139H/R4H
APPHLICDSRVLERYLLEAKEAENITTGCAEHCSLNEHITVPDTKVNFYAWKRMEVGQQAVEVWQGLALLSEAVLRGQALLVNSSQPWEPLQLHVDKAVSGLRSLTTLLRALGAQKEAISPPDAASAAPLRTITADTFHKLFRVYSNFLRGKLKLYTGEACRTGDR

SEQ ID NO: 249 - protein, 166 aa, Homo sapiens
  EPO N38H/R139H/L93I
APPRLICDSRVLERYLLEAKEAENITTGCAEHCSLNEHITVPDTKVNFYAWKRMEVGQQAVEVWQGLALLSEAVLRGQALLVNSSQPWEPLQIHVDKAVSGLRSLTTLLRALGAQKEAISPPDAASAAPLRTITADTFHKLFRVYSNFLRGKLKLYTGEACRTGDR

SEQ ID NO: 250 - protein, 166 aa, Homo sapiens
  EPO N38H/R139H/K20Q
APPRLICDSRVLERYLLEAQEAENITTGCAEHCSLNEHITVPDTKVNFYAWKRMEVGQQAVEVWQGLALLSEAVLRGQALLVNSSQPWEPLQLHVDKAVSGLRSLTTLLRALGAQKEAISPPDAASAAPLRTITADTFHKLFRVYSNFLRGKLKLYTGEACRTGDR

SEQ ID NO: 251 - protein, 166 aa, Homo sapiens
  EPO N38H/R139H/E159N
APPRLICDSRVLERYLLEAKEAENITTGCAEHCSLNEHITVPDTKVNFYAWKRMEVGQQAVEVWQGLALLSEAVLRGQALLVNSSQPWEPLQLHVDKAVSGLRSLTTLLRALGAQKEAISPPDAASAAPLRTITADTFHKLFRVYSNFLRGKLKLYTGNACRTGDR

SEQ ID NO: 252 - protein, 166 aa, Homo sapiens
  EPO N38H/R139H/K52N
APPRLICDSRVLERYLLEAKEAENITTGCAEHCSLNEHITVPDTKVNFYAWNRMEVGQQAVEVWQGLALLSEAVLRGQALLVNSSQPWEPLQLHVDKAVSGLRSLTTLLRALGAQKEAISPPDAASAAPLRTITADTFHKLFRVYSNFLRGKLKLYTGEACRTGDR

SEQ ID NO: 253 - protein, 166 aa, Homo sapiens
  EPO N38H/R139H/L153V
APPRLICDSRVLERYLLEAKEAENITTGCAEHCSLNEHITVPDTKVNFYAWKRMEVGQQAVEVWQGLALLSEAVLRGQALLVNSSQPWEPLQLHVDKAVSGLRSLTTLLRALGAQKEAISPPDAASAAPLRTITADTFHKLFRVYSNFLRGKVKLYTGEACRTGDR

SEQ ID NO: 254 - protein, 166 aa, Homo sapiens
  EPO N38H/N83H/R139H
APPRLICDSRVLERYLLEAKEAENITTGCAEHCSLNEHITVPDTKVNFYAWKRMEVGQQAVEVWQGLALLSEAVLRGQALLVHSSQPWEPLQLHVDKAVSGLRSLTTLLRALGAQKEAISPPDAASAAPLRTITADTFHKLFRVYSNFLRGKLKLYTGEACRTGDR

SEQ ID NO: 255 - protein, 166 aa, Homo sapiens
  EPO K20Q/N38H/N83H/R139H
APPRLICDSRVLERYLLEAQEAENITTGCAEHCSLNEHITVPDTKVNFYAWKRMEVGQQAVEVWQGLALLSEAVLRGQALLVHSSQPWEPLQLHVDKAVSGLRSLTTLLRALGAQKEAISPPDAASAAPLRTITADTFHKLFRVYSNFLRGKLKLYTGEACRTGDR

SEQ ID NO: 256 - protein, 166 aa, Homo sapiens
  EPO N38H/N83H/R139H/L93V
APPRLICDSRVLERYLLEAKEAENITTGCAEHCSLNEHITVPDTKVNFYAWKRMEVGQQAVEVWQGLALLSEAVLRGQALLVHSSQPWEPLQVHVDKAVSGLRSLTTLLRALGAQKEAISPPDAASAAPLRTITADTFHKLFRVYSNFLRGKLKLYTGEACRTGDR

SEQ ID NO: 257 - protein, 166 aa, Homo sapiens
  EPO N38H/N83H/R139H/L80I
APPRLICDSRVLERYLLEAKEAENITTGCAEHCSLNEHITVPDTKVNFYAWKRMEVGQQAVEVWQGLALLSEAVLRGQAILVHSSQPWEPLQLHVDKAVSGLRSLTTLLRALGAQKEAISPPDAASAAPLRTITADTFHKLFRVYSNFLRGKLKLYTGEACRTGDR

SEQ ID NO: 258 - protein, 166 aa, Homo sapiens
  EPO N38H/N83H/R139H/L93I
APPRLICDSRVLERYLLEAKEAENITTGCAEHCSLNEHITVPDTKVNFYAWKRMEVGQQAVEVWQGLALLSEAVLRGQALLVHSSQPWEPLQIHVDKAVSGLRSLTTLLRALGAQKEAISPPDAASAAPLRTITADTFHKLFRVYSNFLRGKLKLYTGEACRTGDR

SEQ ID NO: 259 - protein, 166 aa, Homo sapiens
  EPO K20Q/N38H/L80I/N83H/R139H
APPRLICDSRVLERYLLEAQEAENITTGCAEHCSLNEHITVPDTKVNFYAWKRMEVGQQAVEVWQGLALLSEAVLRGQAILVHSSQPWEPLQLHVDKAVSGLRSLTTLLRALGAQKEAISPPDAASAAPLRTITADTFHKLFRVYSNFLRGKLKLYTGEACRTGDR

SEQ ID NO: 260 - protein, 166 aa, Homo sapiens
  K20Q/N38H/N83H/L93I/R139H
APPRLICDSRVLERYLLEAQEAENITTGCAEHCSLNEHITVPDTKVNFYAWKRMEVGQQAVEVWQGLALLSEAVLRGQALLVHSSQPWEPLQIHVDKAVSGLRSLTTLLRALGAQKEAISPPDAASAAPLRTITADTFHKLFRVYSNFLRGKLKLYTGEACRTGDR

SEQ ID NO: 261 - protein, 166 aa, Homo sapiens
  EPO K20Q/N38H/N83H/L93V/R139H
APPRLICDSRVLERYLLEAQEAENITTGCAEHCSLNEHITVPDTKVNFYAWKRMEVGQQAVEVWQGLALLSEAVLRGQALLVHSSQPWEPLQVHVDKAVSGLRSLTTLLRALGAQKEAISPPDAASAAPLRTITADTFHKLFRVYSNFLRGKLKLYTGEACRTGDR

SEQ ID NO: 262 - protein, 166 aa, Homo sapiens
  EPO N24H/N38H/N83H/R139H/L80I
APPRLICDSRVLERYLLEAKEAEHITTGCAEHCSLNEHITVPDTKVNFYAWKRMEVGQQAVEVWQGLALLSEAVLRGQAILVHSSQPWEPLQLHVDKAVSGLRSLTTLLRALGAQKEAISPPDAASAAPLRTITADTFHKLFRVYSNFLRGKLKLYTGEACRTGDR

SEQ ID NO: 263 - protein, 166 aa, Homo sapiens
  EPO N24H/N38H/N83H/R139H/L93I
APPRLICDSRVLERYLLEAKEAEHITTGCAEHCSLNEHITVPDTKVNFYAWKRMEVGQQAVEVWQGLALLSEAVLRGQALLVHSSQPWEPLQIHVDKAVSGLRSLTTLLRALGAQKEAISPPDAASAAPLRTITADTFHKLFRVYSNFLRGKLKLYTGEACRTGDR

SEQ ID NO: 264 - protein, 166 aa, Homo sapiens
  EPO N24H/N38H/N83H/R139H/L93V
APPRLICDSRVLERYLLEAKEAEHITTGCAEHCSLNEHITVPDTKVNFYAWKRMEVGQQAVEVWQGLALLSEAVLRGQALLVHSSQPWEPLQVHVDKAVSGLRSLTTLLRALGAQKEAISPPDAASAAPLRTITADTFHKLFRVYSNFLRGKLKLYTGEACRTGDR

SEQ ID NO: 265 - protein, 166 aa, Homo sapiens
  EPO K20Q/N24H/N38H/N83H/R139H/L80I
APPRLICDSRVLERYLLEAQEAEHITTGCAEHCSLNEHITVPDTKVNFYAWKRMEVGQQAVEVWQGLALLSEAVLRGQAILVHSSQPWEPLQLHVDKAVSGLRSLTTLLRALGAQKEAISPPDAASAAPLRTITADTFHKLFRVYSNFLRGKLKLYTGEACRTGDR

SEQ ID NO: 266 - protein, 166 aa, Homo sapiens
  EPO K20Q/N24H/N38H/N83H/R139H/L93I
APPRLICDSRVLERYLLEAQEAEHITTGCAEHCSLNEHITVPDTKVNFYAWKRMEVGQQAVEVWQGLALLSEAVLRGQALLVHSSQPWEPLQIHVDKAVSGLRSLTTLLRALGAQKEAISPPDAASAAPLRTITADTFHKLFRVYSNFLRGKLKLYTGEACRTGDR

SEQ ID NO: 267 - protein, 166 aa, Homo sapiens
  EPO K20Q/N24H/N38H/N83H/R139H/L93V
APPRLICDSRVLERYLLEAQEAEHITTGCAEHCSLNEHITVPDTKVNFYAWKRMEVGQQAVEVWQGLALLSEAVLRGQALLVHSSQPWEPLQVHVDKAVSGLRSLTTLLRALGAQKEAISPPDAASAAPLRTITADTFHKLFRVYSNFLRGKLKLYTGEACRTGDR

SEQ ID NO: 268 - protein, 166 aa, Homo sapiens
  EPO R4H/K20Q/N24H/N38H/N83H/R139H/L80I
APPHLICDSRVLERYLLEAQEAEHITTGCAEHCSLNEHITVPDTKVNFYAWKRMEVGQQAVEVWQGLALLSEAVLRGQAILVHSSQPWEPLQLHVDKAVSGLRSLTTLLRALGAQKEAISPPDAASAAPLRTITADTFHKLFRVYSNFLRGKLKLYTGEACRTGDR

SEQ ID NO: 269 - protein, 166 aa, Homo sapiens
  EPO E159H/K20Q/N24H/N38H/N83H/R139H/L93I
APPRLICDSRVLERYLLEAQEAEHITTGCAEHCSLNEHITVPDTKVNFYAWKRMEVGQQAVEVWQGLALLSEAVLRGQALLVHSSQPWEPLQIHVDKAVSGLRSLTTLLRALGAQKEAISPPDAASAAPLRTITADTFHKLFRVYSNFLRGKLKLYTGNACRTGDR

SEQ ID NO: 270 - protein, 166 aa, Homo sapiens
  EPO K20Q/N24H/N38H/N83H/R139H/L153V
APPRLICDSRVLERYLLEAQEAEHITTGCAEHCSLNEHITVPDTKVNFYAWKRMEVGQQAVEVWQGLALLSEAVLRGQALLVHSSQPWEPLQLHVDKAVSGLRSLTTLLRALGAQKEAISPPDAASAAPLRTITADTFHKLFRVYSNFLRGKVKLYTGEACRTGDR

SEQ ID NO: 271 - protein, 166 aa, Homo sapiens
  EPO L153V/K20Q/N24H/N38H/N83H/R139H/L80I
APPRLICDSRVLERYLLEAQEAEHITTGCAEHCSLNEHITVPDTKVNFYAWKRMEVGQQAVEVWQGLALLSEAVLRGQAILVHSSQPWEPLQLHVDKAVSGLRSLTTLLRALGAQKEAISPPDAASAAPLRTITADTFHKLFRVYSNFLRGKVKLYTGEACRTGDR

SEQ ID NO: 272 - protein, 166 aa, Homo sapiens
  EPO E159N/K20Q/N24H/N38H/N83H/R139H/L80I
APPRLICDSRVLERYLLEAQEAEHITTGCAEHCSLNEHITVPDTKVNFYAWKRMEVGQQAVEVWQGLALLSEAVLRGQAILVHSSQPWEPLQLHVDKAVSGLRSLTTLLRALGAQKEAISPPDAASAAPLRTITADTFHKLFRVYSNFLRGKLKLYTGNACRTGDR

SEQ ID NO: 273 - protein, 144 aa, Homo sapiens
  GM-CSF precursor
MWLQSLLLLGTVACSISAPARSPSPSTQPWEHVNAIQEARRLLNLSRDTAAEMNETVEVISEMFDLQEPTCLQTRLELYKQGLRGSLTKLKGPLTMMASHYKQHCPPTPETSCATQIITFESFKENLKDFLLVIPFDCWEPVQE

SEQ ID NO: 274 - protein, 127 aa, Homo sapiens [sequence omitted]

SEQ ID NO: 275 - protein, 554 aa, Homo sapiens
  M-CSF Isoform 1 precursor
MTAPGAAGRCPPTTWLGSLLLLVCLLASRSITEEVSEYCSHMIGSGHLQSLQRLIDSQMETSCQITFEFVDQEQLKDPVCYLKKAFLLVQDIMEDTMRFRDNTPNAIAIVQLQELSLRLKSCFTKDYEEHDKACVRTFYETPLQLLEKVKNVFNETKNLLDKDWNIFSKNCNNSFAECSSQDVVTKPDCNCLYPKAIPSSDPASVSPHQPLAPSMAPVAGLTWEDSEGTEGSSLLPGEQPLHTVDPGSAKQRPPRSTCQSFEPPETPVVKDSTIGGSPQPRPSVGAFNPGMEDILDSAMGTNWVPEEASGEASEIPVPQGTELSPSRPGGGSMQTEPARPSNFLSASSPLPASAKGQQPADVTGTALPRVGPVRPTGQDWNHTPQKTDHPSALLRDPPEPGSPRISSLRPQGLSNPSTLSAQPQLSRSHSSGSVLPLGELEGRRSTRDRRSPAEPEGGPASEGAARPLPRFNSVPLTDTGHERQSEGSSSPQLQESVFHLLVPSVILVLLAVGGLLFYRWRRRSHQEPQRADSPLEQPEGSPLTQDDRQVELPV

SEQ ID NO: 276 - protein, 522 aa, Homo sapiens
  M-CSF Isoform 1 mature
EEVSEYCSHMIGSGHLQSLQRLIDSQMETSCQITFEFVDQEQLKDPVCYLKKAFLLVQDIMEDTMRFRDNTPNAIAIVQLQELSLRLKSCFTKDYEEHDKACVRTFYETPLQLLEKVKNVFNETKNLLDKDWNIFSKNCNNSFAECSSQDVVTKPDCNCLYPKAIPSSDPASVSPHQPLAPSMAPVAGLTWEDSEGTEGSSLLPGEQPLHTVDPGSAKQRPPRSTCQSFEPPETPVVKDSTIGGSPQPRPSVGAFNPGMEDILDSAMGTNWVPEEASGEASEIPVPQGTELSPSRPGGGSMQTEPARPSNFLSASSPLPASAKGQQPADVTGTALPRVGPVRPTGQDWNHTPQKTDHPSALLRDPPEPGSPRISSLRPQGLSNPSTLSAQPQLSRSHSSGSVLPLGELEGRRSTRDRRSPAEPEGGPASEGAARPLPRFNSVPLTDTGHERQSEGSSSPQLQESVFHLLVPSVILVLLAVGGLLFYRWRRRSHQEPQRADSPLEQPEGSPLTQDDRQVELPV

SEQ ID NO: 277 - protein, 438 aa, Homo sapiens
  M-CSF Isoform 2 precursor
MTAPGAAGRCPPTTWLGSLLLLVCLLASRSITEEVSEYCSHMIGSGHLQSLQRLIDSQMETSCQITFEFVDQEQLKDPVCYLKKAFLLVQDIMEDTMRFRDNTPNAIAIVQLQELSLRLKSCFTKDYEEHDKACVRTFYETPLQLLEKVKNVFNETKNLLDKDWNIFSKNCNNSFAECSSQDVVTKPDCNCLYPKAIPSSDPASVSPHQPLAPSMAPVAGLTWEDSEGTEGSSLLPGEQPLHTVDPGSAKQRPPRSTCQSFEPPETPVVKDSTIGGSPQPRPSVGAFNPGMEDILDSAMGTNWVPEEASGEASEIPVPQGTELSPSRPGGGSMQTEPARPSNFLSASSPLPASAKGQQPADVTGHERQSEGSSSPQLQESVFHLLVPSVILVLLAVGGLLFYRWRRRSHQEPQRADSPLEQPEGSPLTQDDRQVELPV

SEQ ID NO: 278 - protein, 406 aa, Homo sapiens
  M-CSF Isoform 2 mature
EEVSEYCSHMIGSGHLQSLQRLIDSQMETSCQITFEFVDQEQLKDPVCYLKKAFLLVQDIMEDTMRFRDNTPNAIAIVQLQELSLRLKSCFTKDYEEHDKACVRTFYETPLQLLEKVKNVFNETKNLLDKDWNIFSKNCNNSFAECSSQDVVTKPDCNCLYPKAIPSSDPASVSPHQPLAPSMAPVAGLTWEDSEGTEGSSLLPGEQPLHTVDPGSAKQRPPRSTCQSFEPPETPVVKDSTIGGSPQPRPSVGAFNPGMEDILDSAMGTNWVPEEASGEASEIPVPQGTELSPSRPGGGSMQTEPARPSNFLSASSPLPASAKGQQPADVTGHERQSEGSSSPQLQESVFHLLVPSVILVLLAVGGLLFYRWRRRSHQEPQRADSPLEQPEGSPLTQDDRQVELPV

SEQ ID NO: 279 - protein, 256 aa, Homo sapiens
  M-CSF Isoform 3 precursor
MTAPGAAGRCPPTTWLGSLLLLVCLLASRSITEEVSEYCSHMIGSGHLQSLQRLIDSQMETSCQITFEFVDQEQLKDPVCYLKKAFLLVQDIMEDTMRFRDNTPNAIAIVQLQELSLRLKSCFTKDYEEHDKACVRTFYETPLQLLEKVKNVFNETKNLLDKDWNIFSKNCNNSFAECSSQGHERQSEGSSSPQLQESVFHLLVPSVILVLLAVGGLLFYRWRRRSHQEPQRADSPLEQPEGSPLTQDDRQVELPV

SEQ ID NO: 280 - protein, 224 aa, Homo sapiens
  M-CSF Isoform 3 mature
EEVSEYCSHMIGSGHLQSLQRLIDSQMETSCQITFEFVDQEQLKDPVCYLKKAFLLVQDIMEDTMRFRDNTPNAIAIVQLQELSLRLKSCFTKDYEEHDKACVRTFYETPLQLLEKVKNVFNETKNLLDKDWNIFSKNCNNSFAECSSQGHERQSEGSSSPQLQESVFHLLVPSVILVLLAVGGLLFYRWRRRSHQEPQRADSPLEQPEGSPLTQDDRQVELPV

SEQ ID NO: 281 - protein, 207 aa, Homo sapiens
  G-CSF precursor
MAGPATQSPMKLMALQLLLWHSALWTVQEATPLGPASSLPQSFLLKCLEQVRKIQGDGAALQEKLVSECATYKLCHPEELVLLGHSLGIPWAPLSSCPSQALQLAGCLSQLHSGLFLYQGLLQALEGISPELGPTLDTLQLDVADFATTIWQQMEELGMAPALQPTQGAMPAFASAFQRRAGGVLVASHLQSFLEVSYRVLRHLAQP

SEQ ID NO: 282 - protein, 177 aa, Homo sapiens
  G-CSF mature
TPLGPASSLPQSFLLKCLEQVRKIQGDGAALQEKLVSECATYKLCHPEELVLLGHSLGIPWAPLSSCPSQALQLAGCLSQLHSGLFLYQGLLQALEGISPELGPTLDTLQLDVADFATTIWQQMEELGMAPALQPTQGAMPAFASAFQRRAGGVLVASHLQSFLEVSYRVLRHLAQP

SEQ ID NO: 283 - protein, 204 aa, Homo sapiens
  G-CSF Isoform b precursor
MAGPATQSPMKLMALQLLLWHSALWTVQEATPLGPASSLPQSFLLKCLEQVRKIQGDGAALQEKLCATYKLCHPEELVLLGHSLGIPWAPLSSCPSQALQLAGCLSQLHSGLFLYQGLLQALEGISPELGPTLDTLQLDVADFATTIWQQMEELGMAPALQPTQGAMPAFASAFQRRAGGVLVASHLQSFLEVSYRVLRHLAQP

SEQ ID NO: 284 - protein, 174 aa, Homo sapiens
  G-CSF Isoform b mature
TPLGPASSLPQSFLLKCLEQVRKIQGDGAALQEKLCATYKLCHPEELVLLGHSLGIPWAPLSSCPSQALQLAGCLSQLHSGLFLYQGLLQALEGISPELGPTLDTLQLDVADFATTIWQQMEELGMAPALQPTQGAMPAFASAFQRRAGGVLVASHLQSFLEVSYRVLRHLAQP

SEQ ID NO: 285 - protein, 202 aa, Homo sapiens
  LIF precursor
MKVLAAGVVPLLLVLHWKHGAGSPLPITPVNATCAIRHPCHNNLMNQIRSQLAQLNGSANALFILYYTAQGEPFPNNLDKLCGPNVTDFPPFHANGTEKAKLVELYRIVVYLGTSLGNITRDQKILNPSALSLHSKLNATADILRGLLSNVLCRLCSKYHVGHVDVTYGPDTSGKDVFQKKKLGCQLLGKYKQIIAVLAQAF

SEQ ID NO: 286 - protein, 180 aa, Homo sapiens
  LIF mature
SPLPITPVNATCAIRHPCHNNLMNQIRSQLAQLNGSANALFILYYTAQGEPFPNNLDKLCGPNVTDFPPFHANGTEKAKLVELYRIVVYLGTSLGNITRDQKILNPSALSLHSKLNATADILRGLLSNVLCRLCSKYHVGHVDVTYGPDTSGKDVFQKKKLGCQLLGKYKQIIAVLAQAF

SEQ ID NO: 287 - protein, 269 aa, Homo sapiens
  IL-1beta precursor
MAEVPELASEMMAYYSGNEDDLFFEADGPKQMKCSFQDLDLCPLDGGIQLRISDHHYSKGFRQAASVVVAMDKLRKMLVPCPQTFQENDLSTFFPFIFEEEPIFFDTWDNEAYVHDAPVRSLNCTLRDSQQKSLVMSGPYELKALHLQGQDMEQQVVFSMSFVQGEESNDKIPVALGLKEKNLYLSCVLKDDKPTLQLESVDPKNYPKKKMEKRFVFNKIEINNKLEFESAQFPNWYISTSQAENMPVFLGGTKGGQDITDFTMQFVSS

SEQ ID NO: 288 - protein, 153 aa, Homo sapiens
  IL-1beta mature
APVRSLNCTLRDSQQKSLVMSGPYELKALHLQGQDMEQQVVFSMSFVQGEESNDKIPVALGLKEKNLYLSCVLKDDKPTLQLESVDPKNYPKKKMEKRFVFNKIEINNKLEFESAQFPNWYISTSQAENMPVFLGGTKGGQDITDFTMQFVSS

SEQ ID NO: 289 - protein, 153 aa, Homo sapiens
  IL-2 precursor
MYRMQLLSCIALSLALVTNSAPTSSSTKKTQLQLEHLLLDLQMILNGINNYKNPKLTRMLTFKFYMPKKATELKHLQCLEEELKPLEEVLNLAQSKNFHLRPRDLISNINVIVLELKGSETTFMCEYADETATIVEFLNRWITFCQSIISTLT

SEQ ID NO: 290 - protein, 133 aa, Homo sapiens [sequence omitted]

SEQ ID NO: 291 - protein, 152 aa, Homo sapiens
  IL-3 precursor
MSRLPVLLLLQLLVRPGLQAPMTQTTPLKTSWVNCSNMIDEIITHLKQPPLPLLDFNNLNGEDQDILMENNLRRPNLEAFNRAVKSLQNASAIESILKNLLPCLPLATAAPTRHPIHIKDGDWNEFRRKLTFYLKTLENAQAQQTTLSLAIF

SEQ ID NO: 292 - protein, 133 aa, Homo sapiens
  IL-3 mature
APMTQTTPLKTSWVNCSNMIDEIITHLKQPPLPLLDFNNLNGEDQDILMENNLRRPNLEAFNRAVKSLQNASAIESILKNLLPCLPLATAAPTRHPIHIKDGDWNEFRRKLTFYLKTLENAQAQQTTLSLAIF

SEQ ID NO: 293 - protein, 153 aa, Homo sapiens [sequence omitted]

SEQ ID NO: 294 - protein, 129 aa, Homo sapiens [sequence omitted]

SEQ ID NO: 295 - protein, 134 aa, Homo sapiens
  IL-5 precursor
MRMLLHLSLLALGAAYVYAIPTEIPTSALVKETLALLSTHRTLLIANETLRIPVPVHKNHQLCTEEIFQGIGTLESQTVQGGTVERLFKNLSLIKKYIDGQKKKCGEERRRVNQFLDYLQEFLGVMNTEWIIES

SEQ ID NO: 296 - protein, 115 aa, Homo sapiens
  IL-5 mature
IPTEIPTSALVKETLALLSTHRTLLIANETLRIPVPVHKNHQLCTEEIFQGIGTLESQTVQGGTVERLFKNLSLIKKYIDGQKKKCGEERRRVNQFLDYLQEFLGVMNTEWIIES

SEQ ID NO: 297 - protein, 212 aa, Homo sapiens
  IL-6 precursor
MNSFSTSAFGPVAFSLGLLLVLPAAFPAPVPPGEDSKDVAAPHRQPLTSSERIDKQIRYILDGISALRKETCNKSNMCESSKEALAENNLNLPKMAEKDGCFQSGFNEETCLVKIITGLLEFEVYLEYLQNRFESSEEQARAVQMSTKVLIQFLQKKAKNLDAITTPDPTTNASLLTKLQAQNQWLQDMTTHLILRSFKEFLQSSLRALRQM

SEQ ID NO: 298 - protein, 183 aa, Homo sapiens
  IL-6 mature
VPPGEDSKDVAAPHRQPLTSSERIDKQIRYILDGISALRKETCNKSNMCESSKEALAENNLNLPKMAEKDGCFQSGFNEETCLVKIITGLLEFEVYLEYLQNRFESSEEQARAVQMSTKVLIQFLQKKAKNLDAITTPDPTTNASLLTKLQAQNQWLQDMTTHLILRSFKEFLQSSLRALRQM

SEQ ID NO: 299 - protein, 252 aa, Homo sapiens
  OSM precursor
MGVLLTQRTLLSLVLALLFPSMASMAAIGSCSKEYRVLLGQLQKQTDLMQDTSRLLDPYIRIQGLDVPKLREHCRERPGAFPSEETLRGLGRRGFLQTLNATLGCVLHRLADLEQRLPKAQDLERSGLNIEDLEKLQMARPNILGLRNNIYCMAQLLDNSDTAEPTKAGRGASQPPTPTPASDAFQRKLEGCRFLHGYHRFMHSVGRVFSKWGESPNRSRRHSPHQALRKGVRRTRPSRKGKRLMTRGQLPR

SEQ ID NO: 300 - protein, 227 aa, Homo sapiens
  OSM mature
AAIGSCSKEYRVLLGQLQKQTDLMQDTSRLLDPYIRIQGLDVPKLREHCRERPGAFPSEETLRGLGRRGFLQTLNATLGCVLHRLADLEQRLPKAQDLERSGLNIEDLEKLQMARPNILGLRNNIYCMAQLLDNSDTAEPTKAGRGASQPPTPTPASDAFQRKLEGCRFLHGYHRFMHSVGRVFSKWGESPNRSRRHSPHQALRKGVRRTRPSRKGKRLMTRGQLPR

SEQ ID NO: 301 - protein, 273 aa, Homo sapiens
  SCF precursor
MKKTQTWILTCIYLQLLLFNPLVKTEGICRNRVTNNVKDVTKLVANLPKDYMITLKYVPGMDVLPSHCWISEMVVQLSDSLTDLLDKFSNISEGLSNYSIIDKLVNIVDDLVECVKENSSKDLKKSFKSPEPRLFTPEEFFRIFNRSIDAFKDFVVASETSDCVVSSTLSPEKDSRVSVTKPFMLPPVAASSLRNDSSSSNRKAKNPPGDSSLHWAAMALPALFSLIIGFAFGALYWKKRQPSLTRAVENIQINEEDNEISMLQEKEREFQEV

SEQ ID NO: 302 - protein, 248 aa, Homo sapiens
  SCF mature
EGICRNRVTNNVKDVTKLVANLPKDYMITLKYVPGMDVLPSHCWISEMVVQLSDSLTDLLDKFSNISEGLSNYSIIDKLVNIVDDLVECVKENSSKDLKKSFKSPEPRLFTPEEFFRIFNRSIDAFKDFVVASETSDCVVSSTLSPEKDSRVSVTKPFMLPPVAASSLRNDSSSSNRKAKNPPGDSSLHWAAMALPALFSLIIGFAFGALYWKKRQPSLTRAVENIQINEEDNEISMLQEKEREFQEV

SEQ ID NO: 303 - protein, 187 aa, Homo sapiens
  IFN-beta precursor
MTNKCLLQIALLLCFSTTALSMSYNLLGFLQRSSNFQCQKLLWQLNGRLEYCLKDRMNFDIPEEIKQLQQFQKEDAALTIYEMLQNIFAIFRQDSSSTGWNETIVENLLANVYHQINHLKTVLEEKLEKEDFTRGKLMSSLHLKRYYGRILHYLKAKEYSHCAWTIVRVEILRNFYFINRLTGYLRN

SEQ ID NO: 304 - protein, 166 aa, Homo sapiens
  IFN-beta mature
MSYNLLGFLQRSSNFQCQKLLWQLNGRLEYCLKDRMNFDIPEEIKQLQQFQKEDAALTIYEMLQNIFAIFRQDSSSTGWNETIVENLLANVYHQINHLKTVLEEKLEKEDFTRGKLMSSLHLKRYYGRILHYLKAKEYSHCAWTIVRVEILRNFYFINRLTGYLRN

SEQ ID NO: 305 - protein, 166 aa, Homo sapiens
  IFN-gamma precursor
MKYTSYILAFQLCIVLGSLGCYCQDPYVKEAENLKKYFNAGHSDVADNGTLFLGILKNWKEESDRKIMQSQIVSFYFKLFKNFKDDQSIQKSVETIKEDMNVKFFNSNKKKRDDFEKLTNYSVTDLNVQRKAIHELIQVMAELSPAAKTGKRKRSQMLFRGRRASQ

SEQ ID NO: 306 - protein, 146 aa, Homo sapiens
  IFN-gamma mature
CYCQDPYVKEAENLKKYFNAGHSDVADNGTLFLGILKNWKEESDRKIMQSQIVSFYFKLFKNFKDDQSIQKSVETIKEDMNVKFFNSNKKKRDDFEKLTNYSVTDLNVQRKAIHELIQVMAELSPAAKTGKRKRSQMLFRGRRASQ

SEQ ID NO: 307 - protein, 166 aa, Homo sapiens
  Human EPO glycosylation variant
  VARIANT 24: Xaa= Asn, Lys or His
  VARIANT 38: Xaa= Asn, Lys or His
  VARIANT 83: Xaa= Asn, Lys or His
APPRLICDSRVLERYLLEAKEAEXITTGCAEHCSLNEXITVPDTKVNFYAWKRMEVGQQAVEVWQGLALLSEAVLRGQALLVXSSQPWEPLQLHVDKAVSGLRSLTTLLRALGAQKEAISPPDAASAAPLRTITADTFRKLFRVYSNFLRGKLKLYTGEACRTGDR

SEQ ID NO: 308 - protein, 165 aa, Homo sapiens
  Human EPO (deltaR166) glycosylation variant
  VARIANT 24: Xaa= Asn, Lys or His
  VARIANT 38: Xaa= Asn, Lys or His
  VARIANT 83: Xaa= Asn, Lys or His
APPRLICDSRVLERYLLEAKEAEXITTGCAEHCSLNEXITVPDTKVNFYAWKRMEVGQQAVEVWQGLALLSEAVLRGQALLVXSSQPWEPLQLHVDKAVSGLRSLTTLLRALGAQKEAISPPDAASAAPLRTITADTFRKLFRVYSNFLRGKLKLYTGEACRTGD

SEQ ID NO: 309 - protein, 166 aa, Homo sapiens
  EPO N24K/N38K/N83K
APPRLICDSRVLERYLLEAKEAEKITTGCAEHCSLNEKITVPDTKVNFYAWKRMEVGQQAVEVWQGLALLSEAVLRGQALLVKSSQPWEPLQLHVDKAVSGLRSLTTLLRALGAQKEAISPPDAASAAPLRTITADTFRKLFRVYSNFLRGKLKLYTGEACRTGDR

SEQ ID NO: 310 - protein, 165 aa, Homo sapiens
  EPO (deltaR166) N24K/N38K/N83K
APPRLICDSRVLERYLLEAKEAEKITTGCAEHCSLNEKITVPDTKVNFYAWKRMEVGQQAVEVWQGLALLSEAVLRGQALLVKSSQPWEPLQLHVDKAVSGLRSLTTLLRALGAQKEAISPPDAASAAPLRTITADTFRKLFRVYSNFLRGKLKLYTGEACRTGD

SEQ ID NO: 311 - protein, 166 aa, Homo sapiens
  R4H/R150H
APPHLICDSRVLERYLLEAKEAENITTGCAEHCSLNENITVPDTKVNFYAWKRMEVGQQAVEVWQGLALLSEAVLRGQALLVNSSQPWEPLQLHVDKAVSGLRSLTTLLRALGAQKEAISPPDAASAAPLRTITADTFRKLFRVYSNFLHGKLKLYTGEACRTGDR

SEQ ID NO: 312 - protein, 166 aa, Homo sapiens
  R4H/R143Q
APPHLICDSRVLERYLLEAKEAENITTGCAEHCSLNENITVPDTKVNFYAWKRMEVGQQAVEVWQGLALLSEAVLRGQALLVNSSQPWEPLQLHVDKAVSGLRSLTTLLRALGAQKEAISPPDAASAAPLRTITADTFRKLFQVYSNFLRGKLKLYTGEACRTGDR

SEQ ID NO: 313 - protein, 166 aa, Homo sapiens
  R4H/E159N
APPHLICDSRVLERYLLEAKEAENITTGCAEHCSLNENITVPDTKVNFYAWKRMEVGQQAVEVWQGLALLSEAVLRGQALLVNSSQPWEPLQLHVDKAVSGLRSLTTLLRALGAQKEAISPPDAASAAPLRTITADTFRKLFRVYSNFLRGKLKLYTGNACRTGDR

SEQ ID NO: 314 - protein, 166 aa, Homo sapiens
  R4H/R139H
APPHLICDSRVLERYLLEAKEAENITTGCAEHCSLNENITVPDTKVNFYAWKRMEVGQQAVEVWQGLALLSEAVLRGQALLVNSSQPWEPLQLHVDKAVSGLRSLTTLLRALGAQKEAISPPDAASAAPLRTITADTFHKLFRVYSNFLRGKLKLYTGEACRTGDR

SEQ ID NO: 315 - protein, 166 aa, Homo sapiens
  R4H/R139Q
APPHLICDSRVLERYLLEAKEAENITTGCAEHCSLNENITVPDTKVNFYAWKRMEVGQQAVEVWQGLALLSEAVLRGQALLVNSSQPWEPLQLHVDKAVSGLRSLTTLLRALGAQKEAISPPDAASAAPLRTITADTFQKLFRVYSNFLRGKLKLYTGEACRTGDR

SEQ ID NO: 316 - protein, 166 aa, Homo sapiens
  R4H/L93I
APPHLICDSRVLERYLLEAKEAENITTGCAEHCSLNENITVPDTKVNFYAWKRMEVGQQAVEVWQGLALLSEAVLRGQALLVNSSQPWEPLQIHVDKAVSGLRSLTTLLRALGAQKEAISPPDAASAAPLRTITADTFRKLFRVYSNFLRGKLKLYTGEACRTGDR

SEQ ID NO: 317 - protein, 166 aa, Homo sapiens
  R4H/D96Q
APPHLICDSRVLERYLLEAKEAENITTGCAEHCSLNENITVPDTKVNFYAWKRMEVGQQAVEVWQGLALLSEAVLRGQALLVNSSQPWEPLQLHVQKAVSGLRSLTTLLRALGAQKEAISPPDAASAAPLRTITADTFRKLFRVYSNFLRGKLKLYTGEACRTGDR

SEQ ID NO: 318 - protein, 166 aa, Homo sapiens
  R4H/L130I
APPHLICDSRVLERYLLEAKEAENITTGCAEHCSLNENITVPDTKVNFYAWKRMEVGQQAVEVWQGLALLSEAVLRGQALLVNSSQPWEPLQLHVDKAVSGLRSLTTLLRALGAQKEAISPPDAASAAPIRTITADTFRKLFRVYSNFLRGKLKLYTGEACRTGDR

SEQ ID NO: 319 - protein, 166 aa, Homo sapiens
  R4H/L153V
APPHLICDSRVLERYLLEAKEAENITTGCAEHCSLNENITVPDTKVNFYAWKRMEVGQQAVEVWQGLALLSEAVLRGQALLVNSSQPWEPLQLHVDKAVSGLRSLTTLLRALGAQKEAISPPDAASAAPLRTITADTFRKLFRVYSNFLRGKVKLYTGEACRTGDR

SEQ ID NO: 320 - protein, 166 aa, Homo sapiens
  R4H/K20Q
APPHLICDSRVLERYLLEAQEAENITTGCAEHCSLNENITVPDTKVNFYAWKRMEVGQQAVEVWQGLALLSEAVLRGQALLVNSSQPWEPLQLHVDKAVSGLRSLTTLLRALGAQKEAISPPDAASAAPLRTITADTFRKLFRVYSNFLRGKLKLYTGEACRTGDR

SEQ ID NO: 321 - protein, 166 aa, Homo sapiens
  R4H/F48I
APPHLICDSRVLERYLLEAKEAENITTGCAEHCSLNENITVPDTKVNIYAWKRMEVGQQAVEVWQGLALLSEAVLRGQALLVNSSQPWEPLQLHVDKAVSGLRSLTTLLRALGAQKEAISPPDAASAAPLRTITADTFRKLFRVYSNFLRGKLKLYTGEACRTGDR

SEQ ID NO: 322 - protein, 166 aa, Homo sapiens
  R4H/R131Q
APPHLICDSRVLERYLLEAKEAENITTGCAEHCSLNENITVPDTKVNFYAWKRMEVGQQAVEVWQGLALLSEAVLRGQALLVNSSQPWEPLQLHVDKAVSGLRSLTTLLRALGAQKEAISPPDAASAAPLQTITADTFRKLFRVYSNFLRGKLKLYTGEACRTGDR

SEQ ID NO: 323 - protein, 166 aa, Homo sapiens
  R4H/K45N
APPHLICDSRVLERYLLEAKEAENITTGCAEHCSLNENITVPDTNVNFYAWKRMEVGQQAVEVWQGLALLSEAVLRGQALLVNSSQPWEPLQLHVDKAVSGLRSLTTLLRALGAQKEAISPPDAASAAPLRTITADTFRKLFRVYSNFLRGKLKLYTGEACRTGDR

SEQ ID NO: 324 - protein, 166 aa, Homo sapiens
  R4H/K52N
APPHLICDSRVLERYLLEAKEAENITTGCAEHCSLNENITVPDTKVNFYAWNRMEVGQQAVEVWQGLALLSEAVLRGQALLVNSSQPWEPLQLHVDKAVSGLRSLTTLLRALGAQKEAISPPDAASAAPLRTITADTFRKLFRVYSNFLRGKLKLYTGEACRTGDR

SEQ ID NO: 325 - protein, 166 aa, Homo sapiens
  R4H/K52Q
APPHLICDSRVLERYLLEAKEAENITTGCAEHCSLNENITVPDTKVNFYAWQRMEVGQQAVEVWQGLALLSEAVLRGQALLVNSSQPWEPLQLHVDKAVSGLRSLTTLLRALGAQKEAISPPDAASAAPLRTITADTFRKLFRVYSNFLRGKLKLYTGEACRTGDR

SEQ ID NO: 326 - protein, 166 aa, Homo sapiens
  R4H/L80I
APPHLICDSRVLERYLLEAKEAENITTGCAEHCSLNENITVPDTKVNFYAWKRMEVGQQAVEVWQGLALLSEAVLRGQAILVNSSQPWEPLQLHVDKAVSGLRSLTTLLRALGAQKEAISPPDAASAAPLRTITADTFRKLFRVYSNFLRGKLKLYTGEACRTGDR

SEQ ID NO: 327 - protein, 166 aa, Homo sapiens
  R4H/K116T
APPHLICDSRVLERYLLEAKEAENITTGCAEHCSLNENITVPDTKVNFYAWKRMEVGQQAVEVWQGLALLSEAVLRGQALLVNSSQPWEPLQLHVDKAVSGLRSLTTLLRALGAQTEAISPPDAASAAPLRTITADTFRKLFRVYSNFLRGKLKLYTGEACRTGDR

SEQ ID NO: 328 - protein, 166 aa, Homo sapiens
  R4H/D123N
APPHLICDSRVLERYLLEAKEAENITTGCAEHCSLNENITVPDTKVNFYAWKRMEVGQQAVEVWQGLALLSEAVLRGQALLVNSSQPWEPLQLHVDKAVSGLRSLTTLLRALGAQKEAISPPNAASAAPLRTITADTFRKLFRVYSNFLRGKLKLYTGEACRTGDR

SEQ ID NO: 329 - protein, 166 aa, Homo sapiens
  R4H/D136N
APPHLICDSRVLERYLLEAKEAENITTGCAEHCSLNENITVPDTKVNFYAWKRMEVGQQAVEVWQGLALLSEAVLRGQALLVNSSQPWEPLQLHVDKAVSGLRSLTTLLRALGAQKEAISPPDAASAAPLRTITANTFRKLFRVYSNFLRGKLKLYTGEACRTGDR

SEQ ID NO: 330 - protein, 166 aa, Homo sapiens
  R4H/P90S
APPHLICDSRVLERYLLEAKEAENITTGCAEHCSLNENITVPDTKVNFYAWKRMEVGQQAVEVWQGLALLSEAVLRGQALLVNSSQPWESLQLHVDKAVSGLRSLTTLLRALGAQKEAISPPDAASAAPLRTITADTFRKLFRVYSNFLRGKLKLYTGEACRTGDR

SEQ ID NO: 331 - protein, 166 aa, Homo sapiens
  R4H/D165Q
APPHLICDSRVLERYLLEAKEAENITTGCAEHCSLNENITVPDTKVNFYAWKRMEVGQQAVEVWQGLALLSEAVLRGQALLVNSSQPWEPLQLHVDKAVSGLRSLTTLLRALGAQKEAISPPDAASAAPLRTITADTFRKLFRVYSNFLRGKLKLYTGEACRTGQR

SEQ ID NO: 332 - protein, 166 aa, Homo sapiens
  R4H/D165H
APPHLICDSRVLERYLLEAKEAENITTGCAEHCSLNENITVPDTKVNFYAWKRMEVGQQAVEVWQGLALLSEAVLRGQALLVNSSQPWEPLQLHVDKAVSGLRSLTTLLRALGAQKEAISPPDAASAAPLRTITADTFRKLFRVYSNFLRGKLKLYTGEACRTGHR

SEQ ID NO: 333 - protein, 166 aa, Homo sapiens
  R4H/D165N
APPHLICDSRVLERYLLEAKEAENITTGCAEHCSLNENITVPDTKVNFYAWKRMEVGQQAVEVWQGLALLSEAVLRGQALLVNSSQPWEPLQLHVDKAVSGLRSLTTLLRALGAQKEAISPPDAASAAPLRTITADTFRKLFRVYSNFLRGKLKLYTGEACRTGNR

SEQ ID NO: 334 - protein, 166 aa, Homo sapiens
  R4H/K116N
APPHLICDSRVLERYLLEAKEAENITTGCAEHCSLNENITVPDTKVNFYAWKRMEVGQQAVEVWQGLALLSEAVLRGQALLVNSSQPWEPLQLHVDKAVSGLRSLTTLLRALGAQNEAISPPDAASAAPLRTITADTFRKLFRVYSNFLRGKLKLYTGEACRTGDR

SEQ ID NO: 335 - protein, 166 aa, Homo sapiens
  R4H/R143H
APPHLICDSRVLERYLLEAKEAENITTGCAEHCSLNENITVPDTKVNFYAWKRMEVGQQAVEVWQGLALLSEAVLRGQALLVNSSQPWEPLQLHVDKAVSGLRSLTTLLRALGAQKEAISPPDAASAAPLRTITADTFRKLFHVYSNFLRGKLKLYTGEACRTGDR

SEQ ID NO: 336 - protein, 166 aa, Homo sapiens
  R4H/R166H
APPHLICDSRVLERYLLEAKEAENITTGCAEHCSLNENITVPDTKVNFYAWKRMEVGQQAVEVWQGLALLSEAVLRGQALLVNSSQPWEPLQLHVDKAVSGLRSLTTLLRALGAQKEAISPPDAASAAPLRTITADTFRKLFRVYSNFLRGKLKLYTGEACRTGDH

SEQ ID NO: 337 - protein, 166 aa, Homo sapiens
  R4H/L16I
APPHLICDSRVLERYILEAKEAENITTGCAEHCSLNENITVPDTKVNFYAWKRMEVGQQAVEVWQGLALLSEAVLRGQALLVNSSQPWEPLQLHVDKAVSGLRSLTTLLRALGAQKEAISPPDAASAAPLRTITADTFRKLFRVYSNFLRGKLKLYTGEACRTGDR

SEQ ID NO: 338 - protein, 166 aa, Homo sapiens
  R4H/L16V
APPHLICDSRVLERYVLEAKEAENITTGCAEHCSLNENITVPDTKVNFYAWKRMEVGQQAVEVWQGLALLSEAVLRGQALLVNSSQPWEPLQLHVDKAVSGLRSLTTLLRALGAQKEAISPPDAASAAPLRTITADTFRKLFRVYSNFLRGKLKLYTGEACRTGDR

SEQ ID NO: 339 - protein, 166 aa, Homo sapiens
  R4H/L93I/R143Q
APPHLICDSRVLERYLLEAKEAENITTGCAEHCSLNENITVPDTKVNFYAWKRMEVGQQAVEVWQGLALLSEAVLRGQALLVNSSQPWEPLQIHVDKAVSGLRSLTTLLRALGAQKEAISPPDAASAAPLRTITADTFRKLFQVYSNFLRGKLKLYTGEACRTGDR

SEQ ID NO: 340 - protein, 166 aa, Homo sapiens
  R4H/L93I/R150H
APPHLICDSRVLERYLLEAKEAENITTGCAEHCSLNENITVPDTKVNFYAWKRMEVGQQAVEVWQGLALLSEAVLRGQALLVNSSQPWEPLQIHVDKAVSGLRSLTTLLRALGAQKEAISPPDAASAAPLRTITADTFRKLFRVYSNFLHGKLKLYTGEACRTGDR

SEQ ID NO: 341 - protein, 166 aa, Homo sapiens
  R4H/R143Q/R150H
APPHLICDSRVLERYLLEAKEAENITTGCAEHCSLNENITVPDTKVNFYAWKRMEVGQQAVEVWQGLALLSEAVLRGQALLVNSSQPWEPLQLHVDKAVSGLRSLTTLLRALGAQKEAISPPDAASAAPLRTITADTFRKLFQVYSNFLHGKLKLYTGEACRTGDR

SEQ ID NO: 342 - protein, 166 aa, Homo sapiens
  R4H/L93I/E159N
APPHLICDSRVLERYLLEAKEAENITTGCAEHCSLNENITVPDTKVNFYAWKRMEVGQQAVEVWQGLALLSEAVLRGQALLVNSSQPWEPLQIHVDKAVSGLRSLTTLLRALGAQKEAISPPDAASAAPLRTITADTFRKLFRVYSNFLRGKLKLYTGNACRTGDR

SEQ ID NO: 343 - protein, 166 aa, Homo sapiens
  NH3 R4H
  VARIANT 24: Xaa= Asn, Lys or His
  VARIANT 38: Xaa= Asn, Lys or His
  VARIANT 83: Xaa= Asn, Lys or His
APPHLICDSRVLERYLLEAKEAEXITTGCAEHCSLNEXITVPDTKVNFYAWKRMEVGQQAVEVWQGLALLSEAVLRGQALLVXSSQPWEPLQLHVDKAVSGLRSLTTLLRALGAQKEAISPPDAASAAPLRTITADTFRKLFRVYSNFLRGKLKLYTGEACRTGDR

SEQ ID NO: 344 - protein, 166 aa, Homo sapiens
  NH3 R139H
  VARIANT 24: Xaa= Asn, Lys or His
  VARIANT 38: Xaa= Asn, Lys or His
  VARIANT 83: Xaa= Asn, Lys or His
APPRLICDSRVLERYLLEAKEAEXITTGCAEHCSLNEXITVPDTKVNFYAWKRMEVGQQAVEVWQGLALLSEAVLRGQALLVXSSQPWEPLQLHVDKAVSGLRSLTTLLRALGAQKEAISPPDAASAAPLRTITADTFHKLFRVYSNFLRGKLKLYTGEACRTGDR

SEQ ID NO: 345 - protein, 166 aa, Homo sapiens
  NH3 R139H R4H
  VARIANT 24: Xaa= Asn, Lys or His
  VARIANT 38: Xaa= Asn, Lys or His
  VARIANT 83: Xaa= Asn, Lys or His
APPHLICDSRVLERYLLEAKEAEXITTGCAEHCSLNEXITVPDTKVNFYAWKRMEVGQQAVEVWQGLALLSEAVLRGQALLVXSSQPWEPLQLHVDKAVSGLRSLTTLLRALGAQKEAISPPDAASAAPLRTITADTFHKLFRVYSNFLRGKLKLYTGEACRTGDR

SEQ ID NO: 346 - protein, 166 aa, Homo sapiens
  NH3 L93I
  VARIANT 24: Xaa= Asn, Lys or His
  VARIANT 38: Xaa= Asn, Lys or His
  VARIANT 83: Xaa= Asn, Lys or His
APPRLICDSRVLERYLLEAKEAEXITTGCAEHCSLNEXITVPDTKVNFYAWKRMEVGQQAVEVWQGLALLSEAVLRGQALLVXSSQPWEPLQIHVDKAVSGLRSLTTLLRALGAQKEAISPPDAASAAPLRTITADTFRKLFRVYSNFLRGKLKLYTGEACRTGDR

SEQ ID NO: 347 - protein, 166 aa, Homo sapiens; identical to SEQ ID NO: 129
  E159N

SEQ ID NO: 348 - protein, 166 aa, Homo sapiens
  NH3 E159N
  VARIANT 24: Xaa= Asn, Lys or His
  VARIANT 38: Xaa= Asn, Lys or His
  VARIANT 83: Xaa= Asn, Lys or His
APPRLICDSRVLERYLLEAKEAEXITTGCAEHCSLNEXITVPDTKVNFYAWKRMEVGQQAVEVWQGLALLSEAVLRGQALLVXSSQPWEPLQLHVDKAVSGLRSLTTLLRALGAQKEAISPPDAASAAPLRTITADTFRKLFRVYSNFLRGKLKLYTGNACRTGDR

SEQ ID NO: 349 - protein, 166 aa, Homo sapiens
  NH3 K52N
  VARIANT 24: Xaa= Asn, Lys or His
  VARIANT 38: Xaa= Asn, Lys or His
  VARIANT 83: Xaa= Asn, Lys or His
APPRLICDSRVLERYLLEAKEAEXITTGCAEHCSLNEXITVPDTKVNFYAWNRMEVGQQAVEVWQGLALLSEAVLRGQALLVXSSQPWEPLQLHVDKAVSGLRSLTTLLRALGAQKEAISPPDAASAAPLRTITADTFRKLFRVYSNFLRGKLKLYTGEACRTGDR

SEQ ID NO: 350 - protein, 166 aa, Homo sapiens
  NH3 L153V
  VARIANT 24: Xaa= Asn, Lys or His
  VARIANT 38: Xaa= Asn, Lys or His
  VARIANT 83: Xaa= Asn, Lys or His
APPRLICDSRVLERYLLEAKEAEXITTGCAEHCSLNEXITVPDTKVNFYAWKRMEVGQQAVEVWQGLALLSEAVLRGQALLVXSSQPWEPLQLHVDKAVSGLRSLTTLLRALGAQKEAISPPDAASAAPLRTITADTFRKLFRVYSNFLRGKVKLYTGEACRTGDR

SEQ ID NO: 351 - protein, 166 aa, Homo sapiens
  R139H K20Q
APPRLICDSRVLERYLLEAQEAENITTGCAEHCSLNENITVPDTKVNFYAWKRMEVGQQAVEVWQGLALLSEAVLRGQALLVNSSQPWEPLQLHVDKAVSGLRSLTTLLRALGAQKEAISPPDAASAAPLRTITADTFHKLFRVYSNFLRGKLKLYTGEACRTGDR

SEQ ID NO: 352 - protein, 166 aa, Homo sapiens
  NH3 R139H K20Q
  VARIANT 24: Xaa= Asn, Lys or His
  VARIANT 38: Xaa= Asn, Lys or His
  VARIANT 83: Xaa= Asn, Lys or His
APPRLICDSRVLERYLLEAQEAEXITTGCAEHCSLNEXITVPDTKVNFYAWKRMEVGQQAVEVWQGLALLSEAVLRGQALLVXSSQPWEPLQLHVDKAVSGLRSLTTLLRALGAQKEAISPPDAASAAPLRTITADTFHKLFRVYSNFLRGKLKLYTGEACRTGDR

SEQ ID NO: 353 - protein, 166 aa, Homo sapiens
  R139H K52N
APPRLICDSRVLERYLLEAKEAENITTGCAEHCSLNENITVPDTKVNFYAWNRMEVGQQAVEVWQGLALLSEAVLRGQALLVNSSQPWEPLQLHVDKAVSGLRSLTTLLRALGAQKEAISPPDAASAAPLRTITADTFNKLFRVYSNFLRGKLKLYTGEACRTGDR

SEQ ID NO: 354 - protein, 166 aa, Homo sapiens
  NH3 R139H K52N
  VARIANT 24: Xaa= Asn, Lys or His
  VARIANT 38: Xaa= Asn, Lys or His
  VARIANT 83: Xaa= Asn, Lys or His
APPRLICDSRVLERYLLEAKEAEXITTGCAEHCSLNEXITVPDTKVNFYAWNRMEVGQQAVEVWQGLALLSEAVLRGQALLVXSSQPWEPLQLHVDKAVSGLRSLTTLLRALGAQKEAISPPDAASAAPLRTITADTFHKLFRVYSNFLRGKLKLYTGEACRTGDR

SEQ ID NO: 355 - protein, 166 aa, Homo sapiens
  R139H L153V
APPRLICDSRVLERYLLEAKEAENITTGCAEHCSLNENITVPDTKVNFYAWKRMEVGQQAVEVWQGLALLSEAVLRGQALLVNSSQPWEPLQLHVDKAVSGLRSLTTLLRALGAQKEAISPPDAASAAPLRTITADTFHKLFRVYSNFLRGKVKLYTGEACRTGDR

SEQ ID NO: 356 - protein, 166 aa, Homo sapiens
  NH3 R139H L153V
  VARIANT 24: Xaa= Asn, Lys or His
  VARIANT 38: Xaa= Asn, Lys or His
  VARIANT 83: Xaa= Asn, Lys or His
APPRLICDSRVLERYLLEAKEAEXITTGCAEHCSLNEXITVPDTKVNFYAWKRMEVGQQAVEVWQGLALLSEAVLRGQALLVXSSQPWEPLQLHVDKAVSGLRSLTTLLRALGAQKEAISPPDAASAAPLRTITADTFHKLFRVYSNFLRGKVKLYTGEACRTGDR

SEQ ID NO: 357 - protein, 166 aa, Homo sapiens
  R139H E159N
APPRLICDSRVLERYLLEAKEAENITTGCAEHCSLNENITVPDTKVNFYAWKRMEVGQQAVEVWQGLALLSEAVLRGQALLVNSSQPWEPLQLHVDKAVSGLRSLTTLLRALGAQKEAISPPDAASAAPLRTITADTFHKLFRVYSNFLRGKLKLYTGNACRTGDR

SEQ ID NO: 358 - protein, 166 aa, Homo sapiens
  NH3 R139H E159N
  VARIANT 24: Xaa= Asn, Lys or His
  VARIANT 38: Xaa= Asn, Lys or His
  VARIANT 83: Xaa= Asn, Lys or His
APPRLICDSRVLERYLLEAKEAEXITTGCAEHCSLNEXITVPDTKVNFYAWKRMEVGQQAVEVWQGLALLSEAVLRGQALLVXSSQPWEPLQLHVDKAVSGLRSLTTLLRALGAQKEAISPPDAASAAPLRTITADTFHKLFRVYSNFLRGKLKLYTGNACRTGDR

SEQ ID NO: 359 - protein, 166 aa, Homo sapiens
  K20Q R139H R4H
APPHLICDSRVLERYLLEAQEAENITTGCAEHCSLNENITVPDTKVNFYAWKRMEVGQQAVEVWQGLALLSEAVLRGQALLVNSSQPWEPLQLHVDKAVSGLRSLTTLLRALGAQKEAISPPDAASAAPLRTITADTFHKLFRVYSNFLRGKLKLYTGEACRTGDR

SEQ ID NO: 360 - protein, 166 aa, Homo sapiens
  NH3 K20Q R139H R4H
  VARIANT 24: Xaa= Asn, Lys or His
  VARIANT 38: Xaa= Asn, Lys or His
  VARIANT 83: Xaa= Asn, Lys or His
APPHLICDSRVLERYLLEAQEAEXITTGCAEHCSLNEXITVPDTKVNFYAWKRMEVGQQAVEVWQGLALLSEAVLRGQALLVXSSQPWEPLQLHVDKAVSGLRSLTTLLRALGAQKEAISPPDAASAAPLRTITADTFHKLFRVYSNFLRGKLKLYTGEACRTGDR

SEQ ID NO: 361 - protein, 166 aa, Homo sapiens
  K20Q R139H K52N
APPRLICDSRVLERYLLEAQEAENITTGCAEHCSLNENITVPDTKVNFYAWNRMEVGQQAVEVWQGLALLSEAVLRGQALLVNSSQPWEPLQLHVDKAVSGLRSLTTLLRALGAQKEAISPPDAASAAPLRTITADTFHKLFRVYSNFLRGKLKLYTGEACRTGDR

SEQ ID NO: 362 - protein, 166 aa, Homo sapiens
  NH3 K20Q R139H K52N
  VARIANT 24: Xaa= Asn, Lys or His
  VARIANT 38: Xaa= Asn, Lys or His
  VARIANT 83: Xaa= Asn, Lys or His
APPRLICDSRVLERYLLEAQEAEXITTGCAEHCSLNEXITVPDTKVNFYAWNRMEVGQQAVEVWQGLALLSEAVLRGQALLVXSSQPWEPLQLHVDKAVSGLRSLTTLLRALGAQKEAISPPDAASAAPLRTITADTFHKLFRVYSNFLRGKLKLYTGEACRTGDR

SEQ ID NO: 363 - protein, 166 aa, Homo sapiens
  K20Q R139H L153V
APPRLICDSRVLERYLLEAQEAENITTGCAEHCSLNENITVPDTKVNFYAWKRMEVGQQAVEVWQGLALLSEAVLRGQALLVNSSQPWEPLQLHVDKAVSGLRSLTTLLRALGAQKEAISPPDAASAAPLRTITADTFHKLFRVYSNFLRGKVKLYTGEACRTGDR

SEQ ID NO: 364 - protein, 166 aa, Homo sapiens
  NH3 K20Q R139H L153V
  VARIANT 24: Xaa= Asn, Lys or His
  VARIANT 38: Xaa= Asn, Lys or His
  VARIANT 83: Xaa= Asn, Lys or His
APPRLICDSRVLERYLLEAQEAEXITTGCAEHCSLNEXITVPDTKVNFYAWKRMEVGQQAVEVWQGLALLSEAVLRGQALLVXSSQPWEPLQLHVDKAVSGLRSLTTLLRALGAQKEAISPPDAASAAPLRTITADTFHKLFRVYSNFLRGKVKLYTGEACRTGDR

SEQ ID NO: 365 - protein, 166 aa, Homo sapiens
  K20Q R139H E159N
APPRLICDSRVLERYLLEAQEAENITTGCAEHCSLNENITVPDTKVNFYAWKRMEVGQQAVEVWQGLALLSEAVLRGQALLVNSSQPWEPLQLHVDKAVSGLRSLTTLLRALGAQKEAISPPDAASAAPLRTITADTFHKLFRVYSNFLRGKLKLYTGNACRTGDR

SEQ ID NO: 366 - protein, 166 aa, Homo sapiens
  NH3 K20Q R139H E159N
  VARIANT 24: Xaa= Asn, Lys or His
  VARIANT 38: Xaa= Asn, Lys or His
  VARIANT 83: Xaa= Asn, Lys or His
APPRLICDSRVLERYLLEAQEAEXITTGCAEHCSLNEXITVPDTKVNFYAWKRMEVGQQAVEVWQGLALLSEAVLRGQALLVXSSQPWEPLQLHVDKAVSGLRSLTTLLRALGAQKEAISPPDAASAAPLRTITADTFHKLFRVYSNFLRGKLKLYTGNACRTGDR

SEQ ID NO: 367 - protein, 166 aa, Homo sapiens
  K20Q R139H L93I
APPRLICDSRVLERYLLEAQEAENITTGCAEHCSLNENITVPDTKVNFYAWKRMEVGQQAVEVWQGLALLSEAVLRGQALLVNSSQPWEPLQIHVDKAVSGLRSLTTLLRALGAQKEAISPPDAASAAPLRTITADTFHKLFRVYSNFLRGKLKLYTGEACRTGDR

SEQ ID NO: 368 - protein, 166 aa, Homo sapiens
  NH3 K20Q R139H L93I
  VARIANT 24: Xaa= Asn, Lys or His
  VARIANT 38: Xaa= Asn, Lys or His
  VARIANT 83: Xaa= Asn, Lys or His
APPRLICDSRVLERYLLEAQEAEXITTGCAEHCSLNEXITVPDTKVNFYAWKRMEVGQQAVEVWQGLALLSEAVLRGQALLVXSSQPWEPLQIHVDKAVSGLRSLTTLLRALGAQKEAISPPDAASAAPLRTITADTFHKLFRVYSNFLRGKLKLYTGEACRTGDR

SEQ ID NO: 369 - protein, 166 aa, Homo sapiens
  L80I R139H R4H
APPHLICDSRVLERYLLEAKEAENITTGCAEHCSLNENITVPDTKVNFYAWKRMEVGQQAVEVWQGLALLSEAVLRGQAILVNSSQPWEPLQLHVDKAVSGLRSLTTLLRALGAQKEAISPPDAASAAPLRTITADTFHKLFRVYSNFLRGKLKLYTGEACRTGDR

SEQ ID NO: 370 - protein, 166 aa, Homo sapiens
  NH3 L80I R139H R4H
  VARIANT 24: Xaa= Asn, Lys or His
  VARIANT 38: Xaa= Asn, Lys or His
  VARIANT 83: Xaa= Asn, Lys or His
APPHLICDSRVLERYLLEAKEAEXITTGCAEHCSLNEXITVPDTKVNFYAWKRMEVGQQAVEVWQGLALLSEAVLRGQAILVXSSQPWEPLQLHVDKAVSGLRSLTTLLRALGAQKEAISPPDAASAAPLRTITADTFHKLFRVYSNFLRGKLKLYTGEACRTGDR

SEQ ID NO: 371 - protein, 166 aa, Homo sapiens
  L80I R139H L93I
APPRLICDSRVLERYLLEAKEAENITTGCAEHCSLNENITVPDTKVNFYAWKRMEVGQQAVEVWQGLALLSEAVLRGQAILVNSSQPWEPLQIHVDKAVSGLRSLTTLLRALGAQKEAISPPDAASAAPLRTITADTFHKLFRVYSNFLRGKLKLYTGEACRTGDR

SEQ ID NO: 372 - protein, 166 aa, Homo sapiens
  NH3 L80I R139H L93I
  VARIANT 24: Xaa= Asn, Lys or His
  VARIANT 38: Xaa= Asn, Lys or His
  VARIANT 83: Xaa= Asn, Lys or His
APPRLICDSRVLERYLLEAKEAEXITTGCAEHCSLNEXITVPDTKVNFYAWKRMEVGQQAVEVWQGLALLSEAVLRGQAILVXSSQPWEPLQIHVDKAVSGLRSLTTLLRALGAQKEAISPPDAASAAPLRTITADTFHKLFRVYSNFLRGKLKLYTGEACRTGDR

SEQ ID NO: 373 - protein, 166 aa, Homo sapiens
  K20Q R139H L80I
APPRLICDSRVLERYLLEAQEAENITTGCAEHCSLNENITVPDTKVNFYAWKRMEVGQQAVEVWQGLALLSEAVLRGQAILVNSSQPWEPLQLHVDKAVSGLRSLTTLLRALGAQKEAISPPDAASAAPLRTITADTFHKLFRVYSNFLRGKLKLYTGEACRTGDR

SEQ ID NO: 374 - protein, 166 aa, Homo sapiens
  NH3 K20Q R139H L80I
  VARIANT 24: Xaa= Asn, Lys or His
  VARIANT 38: Xaa= Asn, Lys or His
  VARIANT 83: Xaa= Asn, Lys or His
APPRLICDSRVLERYLLEAQEAEXITTGCAEHCSLNEXITVPDTKVNFYAWKRMEVGQQAVEVWQGLALLSEAVLRGQAILVXSSQPWEPLQLHVDKAVSGLRSLTTLLRALGAQKEAISPPDAASAAPLRTITADTFHKLFRVYSNFLRGKLKLYTGEACRTGDR

SEQ ID NO: 375 - protein, 166 aa, Homo sapiens
  L80I R139H E159N
APPRLICDSRVLERYLLEAKEAENITTGCAEHCSLNENITVPDTKVNFYAWKRMEVGQQAVEVWQGLALLSEAVLRGQAILVNSSQPWEPLQLHVDKAVSGLRSLTTLLRALGAQKEAISPPDAASAAPLRTITADTFHKLFRVYSNFLRGKLKLYTGNACRTGDR

SEQ ID NO: 376 - protein, 166 aa, Homo sapiens
  NH3 L80I R139H E159N
  VARIANT 24: Xaa= Asn, Lys or His
  VARIANT 38: Xaa= Asn, Lys or His
  VARIANT 83: Xaa= Asn, Lys or His
APPRLICDSRVLERYLLEAKEAEXITTGCAEHCSLNEXITVPDTKVNFYAWKRMEVGQQAVEVWQGLALLSEAVLRGQAILVXSSQPWEPLQLHVDKAVSGLRSLTTLLRALGAQKEAISPPDAASAAPLRTITADTFHKLFRVYSNFLRGKLKLYTGNACRTGDR

SEQ ID NO: 377 - protein, 166 aa, Homo sapiens
  L80I R139H K52N
APPRLICDSRVLERYLLEAKEAENITTGCAEHCSLNENITVPDTKVNFYAWNRMEVGQQAVEVWQGLALLSEAVLRGQAILVNSSQPWEPLQLHVDKAVSGLRSLTTLLRALGAQKEAISPPDAASAAPLRTITADTFHKLFRVYSNFLRGKLKLYTGEACRTGDR

SEQ ID NO: 378 - protein, 166 aa, Homo sapiens
  NH3 L80I R139H K52N
  VARIANT 24: Xaa= Asn, Lys or His
  VARIANT 38: Xaa= Asn, Lys or His
  VARIANT 83: Xaa= Asn, Lys or His
APPRLICDSRVLERYLLEAKEAEXITTGCAEHCSLNEXITVPDTKVNFYAWNRMEVGQQAVEVWQGLALLSEAVLRGQAILVXSSQPWEPLQLHVDKAVSGLRSLTTLLRALGAQKEAISPPDAASAAPLRTITADTFHKLFRVYSNFLRGKLKLYTGEACRTGDR

SEQ ID NO: 379 - protein, 166 aa, Homo sapiens
  L80I R139H L153V
APPRLICDSRVLERYLLEAKEAENITTGCAEHCSLNENITVPDTKVNFYAWKRMEVGQQAVEVWQGLALLSEAVLRGQAILVNSSQPWEPLQLHVDKAVSGLRSLTTLLRALGAQKEAISPPDAASAAPLRTITADTFHKLFRVYSNFLRGKVKLYTGEACRTGDR

SEQ ID NO: 380 - protein, 166 aa, Homo sapiens
  NH3 L80I R139H L153V
  VARIANT 24: Xaa= Asn, Lys or His
  VARIANT 38: Xaa= Asn, Lys or His
  VARIANT 83: Xaa= Asn, Lys or His
APPRLICDSRVLERYLLEAKEAEXITTGCAEHCSLNEXITVPDTKVNFYAWKRMEVGQQAVEVWQGLALLSEAVLRGQAILVXSSQPWEPLQLHVDKAVSGLRSLTTLLRALGAQKEAISPPDAASAAPLRTITADTFHKLFRVYSNFLRGKVKLYTGEACRTGDR

SEQ ID NO: 381 - protein, 166 aa, Homo sapiens
  L93V R139H R4H
APPHLICDSRVLERYLLEAKEAENITTGCAEHCSLNENITVPDTKVNFYAWKRMEVGQQAVEVWQGLALLSEAVLRGQALLVNSSQPWEPLQVHVDKAVSGLRSLTTLLRALGAQKEAISPPDAASAAPLRTITADTFHKLFRVYSNFLRGKLKLYTGEACRTGDR

SEQ ID NO: 382 - protein, 166 aa, Homo sapiens
  NH3 L93V R139H R4H
  VARIANT 24: Xaa= Asn, Lys or His
  VARIANT 38: Xaa= Asn, Lys or His
  VARIANT 83: Xaa= Asn, Lys or His
APPHLICDSRVLERYLLEAKEAEXITTGCAEHCSLNEXITVPDTKVNFYAWKRMEVGQQAVEVWQGLALLSEAVLRGQALLVXSSQPWEPLQVHVDKAVSGLRSLTTLLRALGAQKEAISPPDAASAAPLRTITADTFHKLFRVYSNFLRGKLKLYTGEACRTGDR

SEQ ID NO: 383 - protein, 166 aa, Homo sapiens
  K20Q R139H L93V
APPRLICDSRVLERYLLEAQEAENITTGCAEHCSLNENITVPDTKVNFYAWKRMEVGQQAVEVWQGLALLSEAVLRGQALLVNSSQPWEPLQVHVDKAVSGLRSLTTLLRALGAQKEAISPPDAASAAPLRTITADTFHKLFRVYSNFLRGKLKLYTGEACRTGDR

SEQ ID NO: 384 - protein, 166 aa, Homo sapiens
  NH3 K20Q R139H L93V
  VARIANT 24: Xaa= Asn, Lys or His
  VARIANT 38: Xaa= Asn, Lys or His
  VARIANT 83: Xaa= Asn, Lys or His
APPRLICDSRVLERYLLEAQEAEXITTGCAEHCSLNEXITVPDTKVNFYAWKRMEVGQQAVEVWQGLALLSEAVLRGQALLVXSSQPWEPLQVHVDKAVSGLRSLTTLLRALGAQKEAISPPDAASAAPLRTITADTFHKLFRVYSNFLRGKLKLYTGEACRTGDR

SEQ ID NO: 385 - protein, 166 aa, Homo sapiens
  L93V R139H E159N
APPRLICDSRVLERYLLEAKEAENITTGCAEHCSLNENITVPDTKVNFYAWKRMEVGQQAVEVWQGLALLSEAVLRGQALLVNSSQPWEPLQVHVDKAVSGLRSLTTLLRALGAQKEAISPPDAASAAPLRTITADTFHKLFRVYSNFLRGKLKLYTGNACRTGDR

SEQ ID NO: 386 - protein, 166 aa, Homo sapiens
  NH3 L93V R139H E159N
  VARIANT 24: Xaa= Asn, Lys or His
  VARIANT 38: Xaa= Asn, Lys or His
  VARIANT 83: Xaa= Asn, Lys or His
APPRLICDSRVLERYLLEAKEAEXITTGCAEHCSLNEXITVPDTKVNFYAWKRMEVGQQAVEVWQGLALLSEAVLRGQALLVXSSQPWEPLQVHVDKAVSGLRSLTTLLRALGAQKEAISPPDAASAAPLRTITADTFHKLFRVYSNFLRGKLKLYTGNACRTGDR

SEQ ID NO: 387 - protein, 166 aa, Homo sapiens
  L93V R139H K52N
APPRLICDSRVLERYLLEAKEAENITTGCAEHCSLNENITVPDTKVNFYAWNRMEVGQQAVEVWQGLALLSEAVLRGQALLVNSSQPWEPLQVHVDKAVSGLRSLTTLLRALGAQKEAISPPDAASAAPLRTITADTFHKLFRVYSNFLRGKLKLYTGEACRTGDR

SEQ ID NO: 388 - protein, 166 aa, Homo sapiens
  NH3 L93V R139H K52N
  VARIANT 24: Xaa= Asn, Lys or His
  VARIANT 38: Xaa= Asn, Lys or His
  VARIANT 83: Xaa= Asn, Lys or His
APPRLICDSRVLERYLLEAKEAEXITTGCAEHCSLNEXITVPDTKVNFYAWNRMEVGQQAVEVWQGLALLSEAVLRGQALLVXSSQPWEPLQVHVDKAVSGLRSLTTLLRALGAQKEAISPPDAASAAPLRTITADTFHKLFRVYSNFLRGKLKLYTGEACRTGDR

SEQ ID NO: 389 - protein, 166 aa, Homo sapiens
  L93V R139H L153V
APPRLICDSRVLERYLLEAKEAENITTGCAEHCSLNENITVPDTKVNFYAWKRMEVGQQAVEVWQGLALLSEAVLRGQALLVNSSQPWEPLQVHVDKAVSGLRSLTTLLRALGAQKEAISPPDAASAAPLRTITADTFHKLFRVYSNFLRGKVKLYTGEACRTGDR

SEQ ID NO: 390 - protein, 166 aa, Homo sapiens
  NH3 L93V R139H L153V
  VARIANT 24: Xaa= Asn, Lys or His
  VARIANT 38: Xaa= Asn, Lys or His
  VARIANT 83: Xaa= Asn, Lys or His
APPRLICDSRVLERYLLEAKEAEXITTGCAEHCSLNEXITVPDTKVNFYAWKRMEVGQQAVEVWQGLALLSEAVLRGQALLVXSSQPWEPLQVHVDKAVSGLRSLTTLLRALGAQKEAISPPDAASAAPLRTITADTFHKLFRVYSNFLRGKVKLYTGEACRTGDR

SEQ ID NO: 391 - protein, 166 aa, Homo sapiens
  R4H K20Q L93I R139H
APPHLICDSRVLERYLLEAQEAENITTGCAEHCSLNENITVPDTKVNFYAWKRMEVGQQAVEVWQGLALLSEAVLRGQALLVNSSQPWEPLQIHVDKAVSGLRSLTTLLRALGAQKEAISPPDAASAAPLRTITADTFHKLFRVYSNFLRGKLKLYTGEACRTGDR

SEQ ID NO: 392 - protein, 166 aa, Homo sapiens
  NH3 R4H K20Q L93I R139H
  VARIANT 24: Xaa= Asn, Lys or His
  VARIANT 38: Xaa= Asn, Lys or His
  VARIANT 83: Xaa= Asn, Lys or His
APPHLICDSRVLERYLLEAQEAEXITTGCAEHCSLNEXITVPDTKVNFYAWKRMEVGQQAVEVWQGLALLSEAVLRGQALLVXSSQPWEPLQIHVDKAVSGLRSLTTLLRALGAQKEAISPPDAASAAPLRTITADTFHKLFRVYSNFLRGKLKLYTGEACRTGDR

SEQ ID NO: 393 - protein, 166 aa, Homo sapiens
  K20Q L93I R139H E159N
APPRLICDSRVLERYLLEAQEAENITTGCAEHCSLNENITVPDTKVNFYAWKRMEVGQQAVEVWQGLALLSEAVLRGQALLVNSSQPWEPLQIHVDKAVSGLRSLTTLLRALGAQKEAISPPDAASAAPLRTITADTFHKLFRVYSNFLRGKLKLYTGNACRTGDR

SEQ ID NO: 394 - protein, 166 aa, Homo sapiens
  NH3 K20Q L93I R139H E159N
  VARIANT 24: Xaa= Asn, Lys or His
  VARIANT 38: Xaa= Asn, Lys or His
  VARIANT 83: Xaa= Asn, Lys or His
APPRLICDSRVLERYLLEAQEAEXITTGCAEHCSLNEXITVPDTKVNFYAWKRMEVGQQAVEVWQGLALLSEAVLRGQALLVXSSQPWEPLQIHVDKAVSGLRSLTTLLRALGAQKEAISPPDAASAAPLRTITADTFHKLFRVYSNFLRGKLKLYTGNACRTGDR

SEQ ID NO: 395 - protein, 166 aa, Homo sapiens
  K20Q L93I R139H K52N
APPRLICDSRVLERYLLEAQEAENITTGCAEHCSLNENITVPDTKVNFYAWNRMEVGQQAVEVWQGLALLSEAVLRGQALLVNSSQPWEPLQIHVDKAVSGLRSLTTLLRALGAQKEAISPPDAASAAPLRTITADTFHKLFRVYSNFLRGKLKLYTGEACRTGDR

SEQ ID NO: 396 - protein, 166 aa, Homo sapiens
  NH3 K20Q L93I R139H K52N
  VARIANT 24: Xaa= Asn, Lys or His
  VARIANT 38: Xaa= Asn, Lys or His
  VARIANT 83: Xaa= Asn, Lys or His
APPRLICDSRVLERYLLEAQEAEXITTGCAEHCSLNEXITVPDTKVNFYAWNRMEVGQQAVEVWQGLALLSEAVLRGQALLVXSSQPWEPLQIHVDKAVSGLRSLTTLLRALGAQKEAISPPDAASAAPLRTITADTFHKLFRVYSNFLRGKLKLYTGEACRTGDR

SEQ ID NO: 397 - protein, 166 aa, Homo sapiens
  K20Q L93I R139H L153V
APPRLICDSRVLERYLLEAQEAENITTGCAEHCSLNENITVPDTKVNFYAWKRMEVGQQAVEVWQGLALLSEAVLRGQALLVNSSQPWEPLQIHVDKAVSGLRSLTTLLRALGAQKEAISPPDAASAAPLRTITADTFHKLFRVYSNFLRGKVKLYTGEACRTGDR

SEQ ID NO: 398 - protein, 166 aa, Homo sapiens
  NH3 L20Q L93I R139H L153V
  VARIANT 24: Xaa= Asn, Lys or His
  VARIANT 38: Xaa= Asn, Lys or His
  VARIANT 83: Xaa= Asn, Lys or His
APPRLICDSRVLERYLLEAQEAEXITTGCAEHCSLNEXITVPDTKVNFYAWKRMEVGQQAVEVWQGLALLSEAVLRGQALLVXSSQPWEPLQIHVDKAVSGLRSLTTLLRALGAQKEAISPPDAASAAPLRTITADTFHKLFRVYSNFLRGKVKLYTGEACRTGDR

SEQ ID NO: 399 - protein, 166 aa, Homo sapiens
  R4H K20Q L80I R139H
APPHLICDSRVLERYLLEAQEAENITTGCAEHCSLNENITVPDTKVNFYAWKRMEVGQQAVEVWQGLALLSEAVLRGQAILVNSSQPWEPLQLHVDKAVSGLRSLTTLLRALGAQKEAISPPDAASAAPLRTITADTFHKLFRVYSNFLRGKLKLYTGEACRTGDR

SEQ ID NO: 400 - protein, 166 aa, Homo sapiens
  NH3 R4H K20Q L80I R139H
  VARIANT 24: Xaa= Asn, Lys or His
  VARIANT 38: Xaa= Asn, Lys or His
  VARIANT 83: Xaa= Asn, Lys or His
APPHLICDSRVLERYLLEAQEAEXITTGCAEHCSLNEXITVPDTKVNFYAWKRMEVGQQAVEVWQGLALLSEAVLRGQAILVXSSQPWEPLQLHVDKAVSGLRSLTTLLRALGAQKEAISPPDAASAAPLRTITADTFHKLFRVYSNFLRGKLKLYTGEACRTGDR

SEQ ID NO: 401 - protein, 166 aa, Homo sapiens
  K20Q L80I R139H L93I
APPRLICDSRVLERYLLEAQEAENITTGCAEHCSLNENITVPDTKVNFYAWKRMEVGQQAVEVWQGLALLSEAVLRGQAILVNSSQPWEPLQIHVDKAVSGLRSLTTLLRALGAQKEAISPPDAASAAPLRTITADTFHKLFRVYSNFLRGKLKLYTGEACRTGDR

SEQ ID NO: 402 - protein, 166 aa, Homo sapiens
  NH3 K20Q L80I R139H L93I
  VARIANT 24: Xaa= Asn, Lys or His
  VARIANT 38: Xaa= Asn, Lys or His
  VARIANT 83: Xaa= Asn, Lys or His
APPRLICDSRVLERYLLEAQEAEXITTGCAEHCSLNEXITVPDTKVNFYAWKRMEVGQQAVEVWQGLALLSEAVLRGQAILVXSSQPWEPLQIHVDKAVSGLRSLTTLLRALGAQKEAISPPDAASAAPLRTITADTFHKLFRVYSNFLRGKLKLYTGEACRTGDR

SEQ ID NO: 403 - protein, 166 aa, Homo sapiens
  K20Q L80I R139H E159N
APPRLICDSRVLERYLLEAQEAENITTGCAEHCSLNENITVPDTKVNFYAWKRMEVGQQAVEVWQGLALLSEAVLRGQAILVNSSQPWEPLQLHVDKAVSGLRSLTTLLRALGAQKEAISPPDAASAAPLRTITADTFHKLFRVYSNFLRGKLKLYTGNACRTGDR

SEQ ID NO: 404 - protein, 166 aa, Homo sapiens
  NH3 K20Q L80I R139H E159N
  VARIANT 24: Xaa= Asn, Lys or His
  VARIANT 38: Xaa= Asn, Lys or His
  VARIANT 83: Xaa= Asn, Lys or His
APPRLICDSRVLERYLLEAQEAEXITTGCAEHCSLNEXITVPDTKVNFYAWKRMEVGQQAVEVWQGLALLSEAVLRGQAILVXSSQPWEPLQLHVDKAVSGLRSLTTLLRALGAQKEAISPPDAASAAPLRTITADTFHKLFRVYSNFLRGKLKLYTGNACRTGDR

SEQ ID NO: 405 - protein, 166 aa, Homo sapiens
  K20Q K52N L80I R139H
APPRLICDSRVLERYLLEAQEAENITTGCAEHCSLNENITVPDTKVNFYAWNRMEVGQQAVEVWQGLALLSEAVLRGQAILVNSSQPWEPLQLHVDKAVSGLRSLTTLLRALGAQKEAISPPDAASAAPLRTITADTFHKLFRVYSNFLRGKLKLYTGEACRTGDR

SEQ ID NO: 406 - protein, 166 aa, Homo sapiens
  NH3 K20Q K52N L80I R139H
  VARIANT 24: Xaa= Asn, Lys or His
  VARIANT 38: Xaa= Asn, Lys or His
  VARIANT 83: Xaa= Asn, Lys or His
APPRLICDSRVLERYLLEAQEAEXITTGCAEHCSLNEXITVPDTKVNFYAWNRMEVGQQAVEVWQGLALLSEAVLRGQAILVXSSQPWEPLQLHVDKAVSGLRSLTTLLRALGAQKEAISPPDAASAAPLRTITADTFHKLFRVYSNFLRGKLKLYTGEACRTGDR

SEQ ID NO: 407 - protein, 166 aa, Homo sapiens
  K20Q L80I R139H L153V
APPRLICDSRVLERYLLEAQEAENITTGCAEHCSLNENITVPDTKVNFYAWKRMEVGQQAVEVWQGLALLSEAVLRGQAILVNSSQPWEPLQLHVDKAVSGLRSLTTLLRALGAQKEAISPPDAASAAPLRTITADTFHKLFRVYSNFLRGKVKLYTGEACRTGDR

SEQ ID NO: 408 - protein, 166 aa, Homo sapiens
  NH3 K20Q L80I R139H L153V
  VARIANT 24: Xaa= Asn, Lys or His
  VARIANT 38: Xaa= Asn, Lys or His
  VARIANT 83: Xaa= Asn, Lys or His
APPRLICDSRVLERYLLEAQEAEXITTGCAEHCSLNEXITVPDTKVNFYAWKRMEVGQQAVEVWQGLALLSEAVLRGQAILVXSSQPWEPLQLHVDKAVSGLRSLTTLLRALGAQKEAISPPDAASAAPLRTITADTFHKLFRVYSNFLRGKVKLYTGEACRTGDR

SEQ ID NO: 409 - protein, 166 aa, Homo sapiens
  K20Q L93V R139H R4H
APPHLICDSRVLERYLLEAQEAENITTGCAEHCSLNENITVPDTKVNFYAWKRMEVGQQAVEVWQGLALLSEAVLRGQALLVNSSQPWEPLQVHVDKAVSGLRSLTTLLRALGAQKEAISPPDAASAAPLRTITADTFHKLFRVYSNFLRGKLKLYTGEACRTGDR

SEQ ID NO: 410 - protein, 166 aa, Homo sapiens
  NH3 K20Q L93V R139H R4H
  VARIANT 24: Xaa= Asn, Lys or His
  VARIANT 38: Xaa= Asn, Lys or His
  VARIANT 83: Xaa= Asn, Lys or His
APPHLICDSRVLERYLLEAQEAEXITTGCAEHCSLNEXITVPDTKVNFYAWKRMEVGQQAVEVWQGLALLSEAVLRGQALLVXSSQPWEPLQVHVDKAVSGLRSLTTLLRALGAQKEAISPPDAASAAPLRTITADTFHKLFRVYSNFLRGKLKLYTGEACRTGDR

SEQ ID NO: 411 - protein, 166 aa, Homo sapiens
  K20Q L93V R139H E159N
APPRLICDSRVLERYLLEAQEAENITTGCAEHCSLNENITVPDTKVNFYAWKRMEVGQQAVEVWQGLALLSEAVLRGQALLVNSSQPWEPLQVHVDKAVSGLRSLTTLLRALGAQKEAISPPDAASAAPLRTITADTFHKLFRVYSNFLRGKLKLYTGNACRTGDR

SEQ ID NO: 412 - protein, 166 aa, Homo sapiens
  NH3 K20Q L93V R139H E159N
  VARIANT 24: Xaa= Asn, Lys or His
  VARIANT 38: Xaa= Asn, Lys or His
  VARIANT 83: Xaa= Asn, Lys or His
APPRLICDSRVLERYLLEAQEAEXITTGCAEHCSLNEXITVPDTKVNFYAWKRMEVGQQAVEVWQGLALLSEAVLRGQALLVXSSQPWEPLQVHVDKAVSGLRSLTTLLRALGAQKEAISPPDAASAAPLRTITADTFHKLFRVYSNFLRGKLKLYTGNACRTGDR

SEQ ID NO: 413 - protein, 166 aa, Homo sapiens
  K20Q L93V R139H K52N
APPRLICDSRVLERYLLEAQEAENITTGCAEHCSLNENITVPDTKVNFYAWNRMEVGQQAVEVWQGLALLSEAVLRGQALLVNSSQPWEPLQVHVDKAVSGLRSLTTLLRALGAQKEAISPPDAASAAPLRTITADTFHKLFRVYSNFLRGKLKLYTGEACRTGDR

SEQ ID NO: 414 - protein, 166 aa, Homo sapiens
  NH3 K20Q L93V R139H K52N
  VARIANT 24: Xaa= Asn, Lys or His
  VARIANT 38: Xaa= Asn, Lys or His
  VARIANT 83: Xaa= Asn, Lys or His
APPRLICDSRVLERYLLEAQEAEXITTGCAEHCSLNEXITVPDTKVNFYAWNRMEVGQQAVEVWQGLALLSEAVLRGQALLVXSSQPWEPLQVHVDKAVSGLRSLTTLLRALGAQKEAISPPDAASAAPLRTITADTFHKLFRVYSNFLRGKLKLYTGEACRTGDR

SEQ ID NO: 415 - protein, 166 aa, Homo sapiens
  K20Q L93V R139H L153V
APPRLICDSRVLERYLLEAQEAENITTGCAEHCSLNENITVPDTKVNFYAWKRMEVGQQAVEVWQGLALLSEAVLRGQALLVNSSQPWEPLQVHVDKAVSGLRSLTTLLRALGAQKEAISPPDAASAAPLRTITADTFHKLFRVYSNFLRGKVKLYTGEACRTGDR

SEQ ID NO: 416 - protein, 166 aa, Homo sapiens
  NH3 K20Q L93V R139H L153V
  VARIANT 24: Xaa= Asn, Lys or His
  VARIANT 38: Xaa= Asn, Lys or His
  VARIANT 83: Xaa= Asn, Lys or His
APPRLICDSRVLERYLLEAQEAEXITTGCAEHCSLNEXITVPDTKVNFYAWKRMEVGQQAVEVWQGLALLSEAVLRGQALLVXSSQPWEPLQVHVDKAVSGLRSLTTLLRALGAQKEAISPPDAASAAPLRTITADTFHKLFRVYSNFLRGKVKLYTGEACRTGDR

SEQ ID NO: 417 - protein, 166 aa, Homo sapiens
  R139H L80I
APPRLICDSRVLERYLLEAKEAENITTGCAEHCSLNENITVPDTKVNFYAWKRMEVGQQAVEVWQGLALLSEAVLRGQAILVNSSQPWEPLQLHVDKAVSGLRSLTTLLRALGAQKEAISPPDAASAAPLRTITADTFHKLFRVYSNFLRGKLKLYTGEACRTGDR

SEQ ID NO: 418 - protein, 166 aa, Homo sapiens
  NH3 R139H L80I
  VARIANT 24: Xaa= Asn, Lys or His
  VARIANT 38: Xaa= Asn, Lys or His
  VARIANT 83: Xaa= Asn, Lys or His
APPRLICDSRVLERYLLEAKEAEXITTGCAEHCSLNEXITVPDTKVNFYAWKRMEVGQQAVEVWQGLALLSEAVLRGQAILVXSSQPWEPLQLHVDKAVSGLRSLTTLLRALGAQKEAISPPDAASAAPLRTITADTFHKLFRVYSNFLRGKLKLYTGEACRTGDR

SEQ ID NO: 419 - protein, 166 aa, Homo sapiens
  R139H L93V
APPRLICDSRVLERYLLEAKEAENITTGCAEHCSLNENITVPDTKVNFYAWKRMEVGQQAVEVWQGLALLSEAVLRGQALLVNSSQPWEPLQVHVDKAVSGLRSLTTLLRALGAQKEAISPPDAASAAPLRTITADTFHKLFRVYSNFLRGKLKLYTGEACRTGDR

SEQ ID NO: 420 - protein, 166 aa, Homo sapiens
  NH3 R139H L93V
  VARIANT 24: Xaa= Asn, Lys or His
  VARIANT 38: Xaa= Asn, Lys or His
  VARIANT 83: Xaa= Asn, Lys or His
APPRLICDSRVLERYLLEAKEAEXITTGCAEHCSLNEXITVPDTKVNFYAWKRMEVGQQAVEVWQGLALLSEAVLRGQALLVXSSQPWEPLQVHVDKAVSGLRSLTTLLRALGAQKEAISPPDAASAAPLRTITADTFHKLFRVYSNFLRGKLKLYTGEACRTGDR

SEQ ID NO: 421 - protein, 166 aa, Homo sapiens
  R139H L93I
APPRLICDSRVLERYLLEAKEAENITTGCAEHCSLNENITVPDTKVNFYAWKRMEVGQQAVEVWQGLALLSEAVLRGQALLVNSSQPWEPLQIHVDKAVSGLRSLTTLLRALGAQKEAISPPDAASAAPLRTITADTFHKLFRVYSNFLRGKLKLYTGEACRTGDR

SEQ ID NO: 422 - protein, 166 aa, Homo sapiens
  NH3 R139H L93I
  VARIANT 24: Xaa= Asn, Lys or His
  VARIANT 38: Xaa= Asn, Lys or His
  VARIANT 83: Xaa= Asn, Lys or His
APPRLICDSRVLERYLLEAKEAEXITTGCAEHCSLNEXITVPDTKVNFYAWKRMEVGQQAVEVWQGLALLSEAVLRGQALLVXSSQPWEPLQIHVDKAVSGLRSLTTLLRALGAQKEAISPPDAASAAPLRTITADTFHKLFRVYSNFLRGKLKLYTGEACRTGDR

SEQ ID NO: 423 - protein, 166 aa, Homo sapiens
  NH3 K20Q
  VARIANT 24: Xaa= Asn, Lys or His
  VARIANT 38: Xaa= Asn, Lys or His
  VARIANT 83: Xaa= Asn, Lys or His
APPRLICDSRVLERYLLEAQEAEXITTGCAEHCSLNEXITVPDTKVNFYAWKRMEVGQQAVEVWQGLALLSEAVLRGQALLVXSSQPWEPLQLHVDKAVSGLRSLTTLLRALGAQKEAISPPDAASAAPLRTITADTFRKLFRVYSNFLRGKLKLYTGEACRTGDR

SEQ ID NO: 424 - protein, 166 aa, Homo sapiens
  L93I R139H E159N
APPRLICDSRVLERYLLEAKEAENITTGCAEHCSLNENITVPDTKVNFYAWKRMEVGQQAVEVWQGLALLSEAVLRGQALLVNSSQPWEPLQIHVDKAVSGLRSLTTLLRALGAQKEAISPPDAASAAPLRTITADTFHKLFRVYSNFLRGKLKLYTGNACRTGDR

SEQ ID NO: 425 - protein, 166 aa, Homo sapiens
  NH3 L93I R139H E159N
  VARIANT 24: Xaa= Asn, Lys or His
  VARIANT 38: Xaa= Asn, Lys or His
  VARIANT 83: Xaa= Asn, Lys or His
APPRLICDSRVLERYLLEAKEAEXITTGCAEHCSLNEXITVPDTKVNFYAWKRMEVGQQAVEVWQGLALLSEAVLRGQALLVXSSQPWEPLQIHVDKAVSGLRSLTTLLRALGAQKEAISPPDAASAAPLRTITADTFHKLFRVYSNFLRGKLKLYTGNACRTGDR

SEQ ID NO: 426 - protein, 166 aa, Homo sapiens
  L93I R139H K52N
APPRLICDSRVLERYLLEAKEAENITTGCAEHCSLNENITVPDTKVNFYAWNRMEVGQQAVEVWQGLALLSEAVLRGQALLVNSSQPWEPLQIHVDKAVSGLRSLTTLLRALGAQKEAISPPDAASAAPLRTITADTFHKLFRVYSNFLRGKLKLYTGEACRTGDR

SEQ ID NO: 427 - protein, 166 aa, Homo sapiens
  NH3 L93I R139H K52N
  VARIANT 24: Xaa= Asn, Lys or His
  VARIANT 38: Xaa= Asn, Lys or His
  VARIANT 83: Xaa= Asn, Lys or His
APPRLICDSRVLERYLLEAKEAEXITTGCAEHCSLNEXITVPDTKVNFYAWNRMEVGQQAVEVWQGLALLSEAVLRGQALLVXSSQPWEPLQIHVDKAVSGLRSLTTLLRALGAQKEAISPPDAASAAPLRTITADTFHKLFRVYSNFLRGKLKLYTGEACRTGDR

SEQ ID NO: 428 - protein, 166 aa, Homo sapiens
  L93I R139H L153V
APPRLICDSRVLERYLLEAKEAENITTGCAEHCSLNENITVPDTKVNFYAWKRMEVGQQAVEVWQGLALLSEAVLRGQALLVNSSQPWEPLQIHVDKAVSGLRSLTTLLRALGAQKEAISPPDAASAAPLRTITADTFHKLFRVYSNFLRGKVKLYTGEACRTGDR

SEQ ID NO: 429 - protein, 166 aa, Homo sapiens
  NH3 L93I R139H L153V
  VARIANT 24: Xaa= Asn, Lys or His
  VARIANT 38: Xaa= Asn, Lys or His
  VARIANT 83: Xaa= Asn, Lys or His
APPRLICDSRVLERYLLEAKEAEXITTGCAEHCSLNEXITVPDTKVNFYAWKRMEVGQQAVEVWQGLALLSEAVLRGQALLVXSSQPWEPLQIHVDKAVSGLRSLTTLLRALGAQKEAISPPDAASAAPLRTITADTFHKLFRVYSNFLRGKVKLYTGEACRTGDR

SEQ ID NO: 430 - protein, 166 aa, Homo sapiens
  L93I R139H R4H
APPHLICDSRVLERYLLEAKEAENITTGCAEHCSLNENITVPDTKVNFYAWKRMEVGQQAVEVWQGLALLSEAVLRGQALLVNSSQPWEPLQIHVDKAVSGLRSLTTLLRALGAQKEAISPPDAASAAPLRTITADTFHKLFRVYSNFLRGKLKLYTGEACRTGDR

SEQ ID NO: 431 - protein, 166 aa, Homo sapiens
  NH3 L93I R139H R4H
  VARIANT 24: Xaa= Asn, Lys or His
  VARIANT 38: Xaa= Asn, Lys or His
  VARIANT 83: Xaa= Asn, Lys or His
APPHLICDSRVLERYLLEAKEAEXITTGCAEHCSLNEXITVPDTKVNFYAWKRMEVGQQAVEVWQGLALLSEAVLRGQALLVXSSQPWEPLQIHVDKAVSGLRSLTTLLRALGAQKEAISPPDAASAAPLRTITADTFHKLFRVYSNFLRGKLKLYTGEACRTGDR

SEQ ID NO: 432 - protein, 166 aa, Homo sapiens
  K20Q L93I
APPRLICDSRVLERYLLEAQEAENITTGCAEHCSLNENITVPDTKVNFYAWKRMEVGQQAVEVWQGLALLSEAVLRGQALLVNSSQPWEPLQIHVDKAVSGLRSLTTLLRALGAQKEAISPPDAASAAPLRTITADTFRKLFRVYSNFLRGKLKLYTGEACRTGDR

SEQ ID NO: 433 - protein, 166 aa, Homo sapiens
  NH3 K20Q L93I
  VARIANT 24: Xaa= Asn, Lys or His
  VARIANT 38: Xaa= Asn, Lys or His
  VARIANT 83: Xaa= Asn, Lys or His
APPRLICDSRVLERYLLEAQEAEXITTGCAEHCSLNEXITVPDTKVNFYAWKRMEVGQQAVEVWQGLALLSEAVLRGQALLVXSSQPWEPLQIHVDKAVSGLRSLTTLLRALGAQKEAISPPDAASAAPLRTITADTFRKLFRVYSNFLRGKLKLYTGEACRTGDR

SEQ ID NO: 434 - protein, 166 aa, Homo sapiens
  K20Q L153V
APPRLICDSRVLERYLLEAQEAENITTGCAEHCSLNENITVPDTKVNFYAWKRMEVGQQAVEVWQGLALLSEAVLRGQALLVNSSQPWEPLQLHVDKAVSGLRSLTTLLRALGAQKEAISPPDAASAAPLRTITADTFRKLFRVYSNFLRGKVKLYTGEACRTGDR

SEQ ID NO: 435 - protein, 166 aa, Homo sapiens
  NH3 K20Q L153V
  VARIANT 24: Xaa= Asn, Lys or His
  VARIANT 38: Xaa= Asn, Lys or His
  VARIANT 83: Xaa= Asn, Lys or His
APPRLICDSRVLERYLLEAQEAEXITTGCAEHCSLNEXITVPDTKVNFYAWKRMEVGQQAVEVWQGLALLSEAVLRGQALLVXSSQPWEPLQLHVDKAVSGLRSLTTLLRALGAQKEAISPPDAASAAPLRTITADTFRKLFRVYSNFLRGKVKLYTGEACRTGDR

SEQ ID NO: 436 - protein, 166 aa, Homo sapiens
  K20Q E159N
APPRLICDSRVLERYLLEAQEAENITTGCAEHCSLNENITVPDTKVNFYAWKRMEVGQQAVEVWQGLALLSEAVLRGQALLVNSSQPWEPLQLHVDKAVSGLRSLTTLLRALGAQKEAISPPDAASAAPLRTITADTFRKLFRVYSNFLRGKLKLYTGNACRTGDR

SEQ ID NO: 437 - protein, 166 aa, Homo sapiens
  NH3 K20Q E159N
  VARIANT 24: Xaa= Asn, Lys or His
  VARIANT 38: Xaa= Asn, Lys or His
  VARIANT 83: Xaa= Asn, Lys or His
APPRLICDSRVLERYLLEAQEAEXITTGCAEHCSLNEXITVPDTKVNFYAWKRMEVGQQAVEVWQGLALLSEAVLRGQALLVXSSQPWEPLQLHVDKAVSGLRSLTTLLRALGAQKEAISPPDAASAAPLRTITADTFRKLFRVYSNFLRGKLKLYTGNACRTGDR

SEQ ID NO: 438 - protein, 166 aa, Homo sapiens; identical to SEQ ID NO: 320
  K20Q R4H

SEQ ID NO: 439 - protein, 166 aa, Homo sapiens
  NH3 K20Q R4H
  VARIANT 24: Xaa= Asn, Lys or His
  VARIANT 38: Xaa= Asn, Lys or His
  VARIANT 83: Xaa= Asn, Lys or His
APPHLICDSRVLERYLLEAQEAEXITTGCAEHCSLNEXITVPDTKVNFYAWKRMEVGQQAVEVWQGLALLSEAVLRGQALLVXSSQPWEPLQLHVDKAVSGLRSLTTLLRALGAQKEAISPPDAASAAPLRTITADTFRKLFRVYSNFLRGKLKLYTGEACRTGDR

SEQ ID NO: 440 - protein, 166 aa, Homo sapiens
  K20Q K52N
APPRLICDSRVLERYLLEAQEAENITTGCAEHCSLNENITVPDTKVNFYAWNRMEVGQQAVEVWQGLALLSEAVLRGQALLVNSSQPWEPLQLHVDKAVSGLRSLTTLLRALGAQKEAISPPDAASAAPLRTITADTFRKLFRVYSNFLRGKLKLYTGEACRTGDR

SEQ ID NO: 441 - protein, 166 aa, Homo sapiens
  NH3 K20Q K52N
  VARIANT 24: Xaa= Asn, Lys or His
  VARIANT 38: Xaa= Asn, Lys or His
  VARIANT 83: Xaa= Asn, Lys or His
APPRLICDSRVLERYLLEAQEAEXITTGCAEHCSLNEXITVPDTKVNFYAWNRMEVGQQAVEVWQGLALLSEAVLRGQALLVXSSQPWEPLQLHVDKAVSGLRSLTTLLRALGAQKEAISPPDAASAAPLRTITADTFRKLFRVYSNFLRGKLKLYTGEACRTGDR

SEQ ID NO: 442 - protein, 166 aa, Homo sapiens
  K20Q L80I R139H E159N R4H
APPHLICDSRVLERYLLEAQEAENITTGCAEHCSLNENITVPDTKVNFYAWKRMEVGQQAVEVWQGLALLSEAVLRGQAILVNSSQPWEPLQLHVDKAVSGLRSLTTLLRALGAQKEAISPPDAASAAPLRTITADTFHKLFRVYSNFLRGKLKLYTGNACRTGDR

SEQ ID NO: 443 - protein, 166 aa, Homo sapiens
  NH3 K20Q L80I R139H E159N R4H
  VARIANT 24: Xaa= Asn, Lys or His
  VARIANT 38: Xaa= Asn, Lys or His
  VARIANT 83: Xaa= Asn, Lys or His
APPHLICDSRVLERYLLEAQEAEXITTGCAEHCSLNEXITVPDTKVNFYAWKRMEVGQQAVEVWQGLALLSEAVLRGQAILVXSSQPWEPLQLHVDKAVSGLRSLTTLLRALGAQKEAISPPDAASAAPLRTITADTFHKLFRVYSNFLRGKLKLYTGNACRTGDR

SEQ ID NO: 444 - protein, 166 aa, Homo sapiens
  K20Q L80I R139H E159N K52N
APPRLICDSRVLERYLLEAQEAENITTGCAEHCSLNENITVPDTKVNFYAWNRMEVGQQAVEVWQGLALLSEAVLRGQAILVNSSQPWEPLQLHVDKAVSGLRSLTTLLRALGAQKEAISPPDAASAAPLRTITADTFHKLFRVYSNFLRGKLKLYTGNACRTGDR

SEQ ID NO: 445 - protein, 166 aa, Homo sapiens
  NH3 K20Q L80I R139H E159N K52N
  VARIANT 24: Xaa= Asn, Lys or His
  VARIANT 38: Xaa= Asn, Lys or His
  VARIANT 83: Xaa= Asn, Lys or His
APPRLICDSRVLERYLLEAQEAEXITTGCAEHCSLNEXITVPDTKVNFYAWNRMEVGQQAVEVWQGLALLSEAVLRGQAILVXSSQPWEPLQLHVDKAVSGLRSLTTLLRALGAQKEAISPPDAASAAPLRTITADTFHKLFRVYSNFLRGKLKLYTGNACRTGDR

SEQ ID NO: 446 - protein, 166 aa, Homo sapiens
  K20Q L80I R139H L153V E159N
APPRLICDSRVLERYLLEAQEAENITTGCAEHCSLNENITVPDTKVNFYAWKRMEVGQQAVEVWQGLALLSEAVLRGQAILVNSSQPWEPLQLHVDKAVSGLRSLTTLLRALGAQKEAISPPDAASAAPLRTITADTFHKLFRVYSNFLRGKVKLYTGNACRTGDR

SEQ ID NO: 447 - protein, 166 aa, Homo sapiens
  NH3 K20Q L80I R139H L153V E159N
  VARIANT 24: Xaa= Asn, Lys or His
  VARIANT 38: Xaa= Asn, Lys or His
  VARIANT 83: Xaa= Asn, Lys or His
APPRLICDSRVLERYLLEAQEAEXITTGCAEHCSLNEXITVPDTKVNFYAWKRMEVGQQAVEVWQGLALLSEAVLRGQAILVXSSQPWEPLQLHVDKAVSGLRSLTTLLRALGAQKEAISPPDAASAAPLRTITADTFHKLFRVYSNFLRGKVKLYTGNACRTGDR

SEQ ID NO: 448 - protein, 166 aa, Homo sapiens
  K20Q L80I R139H E159N L93I
APPRLICDSRVLERYLLEAQEAENITTGCAEHCSLNENITVPDTKVNFYAWKRMEVGQQAVEVWQGLALLSEAVLRGQAILVNSSQPWEPLQIHVDKAVSGLRSLTTLLRALGAQKEAISPPDAASAAPLRTITADTFHKLFRVYSNFLRGKLKLYTGNACRTGDR

SEQ ID NO: 449 - protein, 166 aa, Homo sapiens
  NH3 K20Q L80I R139H E159N L93I
  VARIANT 24: Xaa= Asn, Lys or His
  VARIANT 38: Xaa= Asn, Lys or His
  VARIANT 83: Xaa= Asn, Lys or His
APPRLICDSRVLERYLLEAQEAEXITTGCAEHCSLNEXITVPDTKVNFYAWKRMEVGQQAVEVWQGLALLSEAVLRGQAILVXSSQPWEPLQIHVDKAVSGLRSLTTLLRALGAQKEAISPPDAASAAPLRTITADTFHKLFRVYSNFLRGKLKLYTGNACRTGDR

SEQ ID NO: 450 - protein, 166 aa, Homo sapiens
  K20Q L80I R139H L153V R4H
APPHLICDSRVLERYLLEAQEAENITTGCAEHCSLNENITVPDTKVNFYAWKRMEVGQQAVEVWQGLALLSEAVLRGQAILVNSSQPWEPLQLHVDKAVSGLRSLTTLLRALGAQKEAISPPDAASAAPLRTITADTFHKLFRVYSNFLRGKVKLYTGEACRTGDR

SEQ ID NO: 451 - protein, 166 aa, Homo sapiens
  NH3 K20Q L80I R139H L153V R4H
  VARIANT 24: Xaa= Asn, Lys or His
  VARIANT 38: Xaa= Asn, Lys or His
  VARIANT 83: Xaa= Asn, Lys or His
APPHLICDSRVLERYLLEAQEAEXITTGCAEHCSLNEXITVPDTKVNFYAWKRMEVGQQAVEVWQGLALLSEAVLRGQAILVXSSQPWEPLQLHVDKAVSGLRSLTTLLRALGAQKEAISPPDAASAAPLRTITADTFHKLFRVYSNFLRGKVKLYTGEACRTGDR

SEQ ID NO: 452 - protein, 166 aa, Homo sapiens
  K20Q K52N L80I R139H L153V
APPRLICDSRVLERYLLEAQEAENITTGCAEHCSLNENITVPDTKVNFYAWNRMEVGQQAVEVWQGLALLSEAVLRGQAILVNSSQPWEPLQLHVDKAVSGLRSLTTLLRALGAQKEAISPPDAASAAPLRTITADTFHKLFRVYSNFLRGKVKLYTGEACRTGDR

SEQ ID NO: 453 - protein, 166 aa, Homo sapiens
  NH3 K20Q K52N L80I R139H L153V
  VARIANT 24: Xaa= Asn, Lys or His
  VARIANT 38: Xaa= Asn, Lys or His
  VARIANT 83: Xaa= Asn, Lys or His
APPRLICDSRVLERYLLEAQEAEXITTGCAEHCSLNEXITVPDTKVNFYAWNRMEVGQQAVEVWQGLALLSEAVLRGQAILVXSSQPWEPLQLHVDKAVSGLRSLTTLLRALGAQKEAISPPDAASAAPLRTITADTFHKLFRVYSNFLRGKVKLYTGEACRTGDR

SEQ ID NO: 454 - protein, 166 aa, Homo sapiens
  K20Q L80I R139H L153V L93I
APPRLICDSRVLERYLLEAQEAENITTGCAEHCSLNENITVPDTKVNFYAWKRMEVGQQAVEVWQGLALLSEAVLRGQAILVNSSQPWEPLQIHVDKAVSGLRSLTTLLRALGAQKEAISPPDAASAAPLRTITADTFHKLFRVYSNFLRGKVKLYTGEACRTGDR

SEQ ID NO: 455 - protein, 166 aa, Homo sapiens
  NH3 K20Q L80I R139H L153V L93I
  VARIANT 24: Xaa= Asn, Lys or His
  VARIANT 38: Xaa= Asn, Lys or His
  VARIANT 83: Xaa= Asn, Lys or His
APPRLICDSRVLERYLLEAQEAEXITTGCAEHCSLNEXITVPDTKVNFYAWKRMEVGQQAVEVWQGLALLSEAVLRGQAILVXSSQPWEPLQIHVDKAVSGLRSLTTLLRALGAQKEAISPPDAASAAPLRTITADTFHKLFRVYSNFLRGKVKLYTGEACRTGDR

SEQ ID NO: 456 - protein, 166 aa, Homo sapiens
  K20Q R139H E159N R4H
APPHLICDSRVLERYLLEAQEAENITTGCAEHCSLNENITVPDTKVNFYAWKRMEVGQQAVEVWQGLALLSEAVLRGQALLVNSSQPWEPLQLHVDKAVSGLRSLTTLLRALGAQKEAISPPDAASAAPLRTITADTFHKLFRVYSNFLRGKLKLYTGNACRTGDR

SEQ ID NO: 457 - protein, 166 aa, Homo sapiens
  NH3 K20Q R139H E159N R4H
  VARIANT 24: Xaa= Asn, Lys or His
  VARIANT 38: Xaa= Asn, Lys or His
  VARIANT 83: Xaa= Asn, Lys or His
APPHLICDSRVLERYLLEAQEAEXITTGCAEHCSLNEXITVPDTKVNFYAWKRMEVGQQAVEVWQGLALLSEAVLRGQALLVXSSQPWEPLQLHVDKAVSGLRSLTTLLRALGAQKEAISPPDAASAAPLRTITADTFHKLFRVYSNFLRGKLKLYTGNACRTGDR

SEQ ID NO: 458 - protein, 166 aa, Homo sapiens
  K20Q R139H E159N K52N
APPRLICDSRVLERYLLEAQEAENITTGCAEHCSLNENITVPDTKVNFYAWNRMEVGQQAVEVWQGLALLSEAVLRGQALLVNSSQPWEPLQLHVDKAVSGLRSLTTLLRALGAQKEAISPPDAASAAPLRTITADTFHKLFRVYSNFLRGKLKLYTGNACRTGDR

SEQ ID NO: 459 - protein, 166 aa, Homo sapiens
  NH3 K20Q R139H E159N K52N
  VARIANT 24: Xaa= Asn, Lys or His
  VARIANT 38: Xaa= Asn, Lys or His
  VARIANT 83: Xaa= Asn, Lys or His
APPRLICDSRVLERYLLEAQEAEXITTGCAEHCSLNEXITVPDTKVNFYAWNRMEVGQQAVEVWQGLALLSEAVLRGQALLVXSSQPWEPLQLHVDKAVSGLRSLTTLLRALGAQKEAISPPDAASAAPLRTITADTFHKLFRVYSNFLRGKLKLYTGNACRTGDR

SEQ ID NO: 460 - protein, 166 aa, Homo sapiens
  K20Q R139H E159N L153V
APPRLICDSRVLERYLLEAQEAENITTGCAEHCSLNENITVPDTKVNFYAWKRMEVGQQAVEVWQGLALLSEAVLRGQALLVNSSQPWEPLQLHVDKAVSGLRSLTTLLRALGAQKEAISPPDAASAAPLRTITADTFHKLFRVYSNFLRGKVKLYTGNACRTGDR

SEQ ID NO: 461 - protein, 166 aa, Homo sapiens
  NH3 K20Q R139H E159N L153V
  VARIANT 24: Xaa= Asn, Lys or His
  VARIANT 38: Xaa= Asn, Lys or His
  VARIANT 83: Xaa= Asn, Lys or His
APPRLICDSRVLERYLLEAQEAEXITTGCAEHCSLNEXITVPDTKVNFYAWKRMEVGQQAVEVWQGLALLSEAVLRGQALLVXSSQPWEPLQLHVDKAVSGLRSLTTLLRALGAQKEAISPPDAASAAPLRTITADTFHKLFRVYSNFLRGKVKLYTGNACRTGDR

SEQ ID NO: 462 - protein, 166 aa, Homo sapiens
  K20Q L93I R139H E159N R4H
APPHLICDSRVLERYLLEAQEAENITTGCAEHCSLNENITVPDTKVNFYAWKRMEVGQQAVEVWQGLALLSEAVLRGQALLVNSSQPWEPLQIHVDKAVSGLRSLTTLLRALGAQKEAISPPDAASAAPLRTITADTFHKLFRVYSNFLRGKLKLYTGNACRTGDR

SEQ ID NO: 463 - protein, 166 aa, Homo sapiens
  NH3 K20Q L93I R139H E159N R4H
  VARIANT 24: Xaa= Asn, Lys or His
  VARIANT 38: Xaa= Asn, Lys or His
  VARIANT 83: Xaa= Asn, Lys or His
APPHLICDSRVLERYLLEAQEAEXITTGCAEHCSLNEXITVPDTKVNFYAWKRMEVGQQAVEVWQGLALLSEAVLRGQALLVXSSQPWEPLQIHVDKAVSGLRSLTTLLRALGAQKEAISPPDAASAAPLRTITADTFHKLFRVYSNFLRGKLKLYTGNACRTGDR

SEQ ID NO: 464 - protein, 166 aa, Homo sapiens
  K20Q L93I R139H E159N K52N
APPRLICDSRVLERYLLEAQEAENITTGCAEHCSLNENITVPDTKVNFYAWNRMEVGQQAVEVWQGLALLSEAVLRGQALLVNSSQPWEPLQIHVDKAVSGLRSLTTLLRALGAQKEAISPPDAASAAPLRTITADTFHKLFRVYSNFLRGKLKLYTGNACRTGDR

SEQ ID NO: 465 - protein, 166 aa, Homo sapiens
  NH3 K20Q L93I R139H E159N K52N
  VARIANT 24: Xaa= Asn, Lys or His
  VARIANT 38: Xaa= Asn, Lys or His
  VARIANT 83: Xaa= Asn, Lys or His
APPRLICDSRVLERYLLEAQEAEXITTGCAEHCSLNEXITVPDTKVNFYAWNRMEVGQQAVEVWQGLALLSEAVLRGQALLVXSSQPWEPLQIHVDKAVSGLRSLTTLLRALGAQKEAISPPDAASAAPLRTITADTFHKLFRVYSNFLRGKLKLYTGNACRTGDR

SEQ ID NO: 466 - protein, 166 aa, Homo sapiens
  K20Q L93I R139H E159N L153V
APPRLICDSRVLERYLLEAQEAENITTGCAEHCSLNENITVPDTKVNFYAWKRMEVGQQAVEVWQGLALLSEAVLRGQALLVNSSQPWEPLQIHVDKAVSGLRSLTTLLRALGAQKEAISPPDAASAAPLRTITADTFHKLFRVYSNFLRGKVKLYTGNACRTGDR

SEQ ID NO: 467 - protein, 166 aa, Homo sapiens
  NH3 K20Q L93I R139H E159N L153V
  VARIANT 24: Xaa= Asn, Lys or His
  VARIANT 38: Xaa= Asn, Lys or His
  VARIANT 83: Xaa= Asn, Lys or His
APPRLICDSRVLERYLLEAQEAEXITTGCAEHCSLNEXITVPDTKVNFYAWKRMEVGQQAVEVWQGLALLSEAVLRGQALLVXSSQPWEPLQIHVDKAVSGLRSLTTLLRALGAQKEAISPPDAASAAPLRTITADTFHKLFRVYSNFLRGKVKLYTGNACRTGDR

SEQ ID NO: 468 - protein, 166 aa, Homo sapiens
  R4H K20Q K52N L80I R139H
APPHLICDSRVLERYLLEAQEAENITTGCAEHCSLNENITVPDTKVNFYAWNRMEVGQQAVEVWQGLALLSEAVLRGQAILVNSSQPWEPLQLHVDKAVSGLRSLTTLLRALGAQKEAISPPDAASAAPLRTITADTFHKLFRVYSNFLRGKLKLYTGEACRTGDR

SEQ ID NO: 469 - protein, 166 aa, Homo sapiens
  NH3 R4H K20Q K52N L80I R139H
  VARIANT 24: Xaa= Asn, Lys or His
  VARIANT 38: Xaa= Asn, Lys or His
  VARIANT 83: Xaa= Asn, Lys or His
APPHLICDSRVLERYLLEAQEAEXITTGCAEHCSLNEXITVPDTKVNFYAWNRMEVGQQAVEVWQGLALLSEAVLRGQAILVXSSQPWEPLQLHVDKAVSGLRSLTTLLRALGAQKEAISPPDAASAAPLRTITADTFHKLFRVYSNFLRGKLKLYTGEACRTGDR

SEQ ID NO: 470 - protein, 166 aa, Homo sapiens
  R4H K20Q L80I R139H L93I
APPHLICDSRVLERYLLEAQEAENITTGCAEHCSLNENITVPDTKVNFYAWKRMEVGQQAVEVWQGLALLSEAVLRGQAILVNSSQPWEPLQIHVDKAVSGLRSLTTLLRALGAQKEAISPPDAASAAPLRTITADTFHKLFRVYSNFLRGKLKLYTGEACRTGDR

SEQ ID NO: 471 - protein, 166 aa, Homo sapiens
  NH3 R4H K20Q L80I R139H L93I
  VARIANT 24: Xaa= Asn, Lys or His
  VARIANT 38: Xaa= Asn, Lys or His
  VARIANT 83: Xaa= Asn, Lys or His
APPHLICDSRVLERYLLEAQEAEXITTGCAEHCSLNEXITVPDTKVNFYAWKRMEVGQQAVEVWQGLALLSEAVLRGQAILVXSSQPWEPLQIHVDKAVSGLRSLTTLLRALGAQKEAISPPDAASAAPLRTITADTFHKLFRVYSNFLRGKLKLYTGEACRTGDR

SEQ ID NO: 472 - protein, 166 aa, Homo sapiens
  K20Q R139H L153V R4H
APPHLICDSRVLERYLLEAQEAENITTGCAEHCSLNENITVPDTKVNFYAWKRMEVGQQAVEVWQGLALLSEAVLRGQALLVNSSQPWEPLQLHVDKAVSGLRSLTTLLRALGAQKEAISPPDAASAAPLRTITADTFHKLFRVYSNFLRGKVKLYTGEACRTGDR

SEQ ID NO: 473 - protein, 166 aa, Homo sapiens
  NH3 K20Q R139H L153V R4H
  VARIANT 24: Xaa= Asn, Lys or His
  VARIANT 38: Xaa= Asn, Lys or His
  VARIANT 83: Xaa= Asn, Lys or His
APPHLICDSRVLERYLLEAQEAEXITTGCAEHCSLNEXITVPDTKVNFYAWKRMEVGQQAVEVWQGLALLSEAVLRGQALLVXSSQPWEPLQLHVDKAVSGLRSLTTLLRALGAQKEAISPPDAASAAPLRTITADTFHKLFRVYSNFLRGKVKLYTGEACRTGDR

SEQ ID NO: 474 - protein, 166 aa, Homo sapiens
  K20Q R139H K52N L153V
APPRLICDSRVLERYLLEAQEAENITTGCAEHCSLNENITVPDTKVNFYAWNRMEVGQQAVEVWQGLALLSEAVLRGQALLVNSSQPWEPLQLHVDKAVSGLRSLTTLLRALGAQKEAISPPDAASAAPLRTITADTFHKLFRVYSNFLRGKVKLYTGEACRTGDR

SEQ ID NO: 475 - protein, 166 aa, Homo sapiens
  NH3 K20Q R139H K52N L153V
  VARIANT 24: Xaa= Asn, Lys or His
  VARIANT 38: Xaa= Asn, Lys or His
  VARIANT 83: Xaa= Asn, Lys or His
APPRLICDSRVLERYLLEAQEAEXITTGCAEHCSLNEXITVPDTKVNFYAWNRMEVGQQAVEVWQGLALLSEAVLRGQALLVXSSQPWEPLQLHVDKAVSGLRSLTTLLRALGAQKEAISPPDAASAAPLRTITADTFHKLFRVYSNFLRGKVKLYTGEACRTGDR

SEQ ID NO: 476 - protein, 166 aa, Homo sapiens
  R4H K20Q L93I R139H K52N
APPHLICDSRVLERYLLEAQEAENITTGCAEHCSLNENITVPDTKVNFYAWNRMEVGQQAVEVWQGLALLSEAVLRGQALLVNSSQPWEPLQIHVDKAVSGLRSLTTLLRALGAQKEAISPPDAASAAPLRTITADTFHKLFRVYSNFLRGKLKLYTGEACRTGDR

SEQ ID NO: 477 - protein, 166 aa, Homo sapiens
  NH3 R4H K20Q L93I R139H K52N
  VARIANT 24: Xaa= Asn, Lys or His
  VARIANT 38: Xaa= Asn, Lys or His
  VARIANT 83: Xaa= Asn, Lys or His
APPHLICDSRVLERYLLEAQEAEXITTGCAEHCSLNEXITVPDTKVNFYAWNRMEVGQQAVEVWQGLALLSEAVLRGQALLVXSSQPWEPLQIHVDKAVSGLRSLTTLLRALGAQKEAISPPDAASAAPLRTITADTFHKLFRVYSNFLRGKLKLYTGEACRTGDR

SEQ ID NO: 478 - protein, 166 aa, Homo sapiens
  R4H K20Q L93I R139H L153V
APPHLICDSRVLERYLLEAQEAENITTGCAEHCSLNENITVPDTKVNFYAWKRMEVGQQAVEVWQGLALLSEAVLRGQALLVNSSQPWEPLQIHVDKAVSGLRSLTTLLRALGAQKEAISPPDAASAAPLRTITADTFHKLFRVYSNFLRGKVKLYTGEACRTGDR

SEQ ID NO: 479 - protein, 166 aa, Homo sapiens
  NH3 R4H K20Q L93I R139H L153V
  VARIANT 24: Xaa= Asn, Lys or His
  VARIANT 38: Xaa= Asn, Lys or His
  VARIANT 83: Xaa= Asn, Lys or His
APPHLICDSRVLERYLLEAQEAEXITTGCAEHCSLNEXITVPDTKVNFYAWKRMEVGQQAVEVWQGLALLSEAVLRGQALLVXSSQPWEPLQIHVDKAVSGLRSLTTLLRALGAQKEAISPPDAASAAPLRTITADTFHKLFRVYSNFLRGKVKLYTGEACRTGDR

SEQ ID NO: 480 - protein, 166 aa, Homo sapiens
  K20Q L93V R139H E159N R4H
APPHLICDSRVLERYLLEAQEAENITTGCAEHCSLNENITVPDTKVNFYAWKRMEVGQQAVEVWQGLALLSEAVLRGQALLVNSSQPWEPLQVHVDKAVSGLRSLTTLLRALGAQKEAISPPDAASAAPLRTITADTFHKLFRVYSNFLRGKLKLYTGNACRTGDR

SEQ ID NO: 481 - protein, 166 aa, Homo sapiens
  NH3 K20Q L93V R139H E159N R4H
  VARIANT 24: Xaa= Asn, Lys or His
  VARIANT 38: Xaa= Asn, Lys or His
  VARIANT 83: Xaa= Asn, Lys or His
APPHLICDSRVLERYLLEAQEAEXITTGCAEHCSLNEXITVPDTKVNFYAWKRMEVGQQAVEVWQGLALLSEAVLRGQALLVXSSQPWEPLQVHVDKAVSGLRSLTTLLRALGAQKEAISPPDAASAAPLRTITADTFHKLFRVYSNFLRGKLKLYTGNACRTGDR

SEQ ID NO: 482 - protein, 166 aa, Homo sapiens
  K20Q L93V R139H E159N K52N
APPRLICDSRVLERYLLEAQEAENITTGCAEHCSLNENITVPDTKVNFYAWNRMEVGQQAVEVWQGLALLSEAVLRGQALLVNSSQPWEPLQVHVDKAVSGLRSLTTLLRALGAQKEAISPPDAASAAPLRTITADTFHKLFRVYSNFLRGKLKLYTGNACRTGDR

SEQ ID NO: 483 - protein, 166 aa, Homo sapiens
  NH3 K20Q L93V R139H E159N K52N
  VARIANT 24: Xaa= Asn, Lys or His
  VARIANT 38: Xaa= Asn, Lys or His
  VARIANT 83: Xaa= Asn, Lys or His
APPRLICDSRVLERYLLEAQEAEXITTGCAEHCSLNEXITVPDTKVNFYAWNRMEVGQQAVEVWQGLALLSEAVLRGQALLVXSSQPWEPLQVHVDKAVSGLRSLTTLLRALGAQKEAISPPDAASAAPLRTITADTFHKLFRVYSNFLRGKLKLYTGNACRTGDR

SEQ ID NO: 484 - protein, 166 aa, Homo sapiens
  NH3 L80I
  VARIANT 24: Xaa= Asn, Lys or His
  VARIANT 38: Xaa= Asn, Lys or His
  VARIANT 83: Xaa= Asn, Lys or His
APPRLICDSRVLERYLLEAKEAEXITTGCAEHCSLNEXITVPDTKVNFYAWKRMEVGQQAVEVWQGLALLSEAVLRGQAILVXSSQPWEPLQLHVDKAVSGLRSLTTLLRALGAQKEAISPPDAASAAPLRTITADTFRKLFRVYSNFLRGKLKLYTGEACRTGDR

SEQ ID NO: 485 - protein, 166 aa, Homo sapiens
  NH3 L93V
  VARIANT 24: Xaa= Asn, Lys or His
  VARIANT 38: Xaa= Asn, Lys or His
  VARIANT 83: Xaa= Asn, Lys or His
APPRLICDSRVLERYLLEAKEAEXITTGCAEHCSLNEXITVPDTKVNFYAWKRMEVGQQAVEVWQGLALLSEAVLRGQALLVXSSQPWEPLQVHVDKAVSGLRSLTTLLRALGAQKEAISPPDAASAAPLRTITADTFRKLFRVYSNFLRGKLKLYTGEACRTGDR

SEQ ID NO: 486 - protein, 166 aa, Homo sapiens
  K20Q L80I
APPRLICDSRVLERYLLEAQEAENITTGCAEHCSLNENITVPDTKVNFYAWKRMEVGQQAVEVWQGLALLSEAVLRGQAILVNSSQPWEPLQLHVDKAVSGLRSLTTLLRALGAQKEAISPPDAASAAPLRTITADTFRKLFRVYSNFLRGKLKLYTGEACRTGDR

SEQ ID NO: 487 - protein, 166 aa, Homo sapiens
  NH3 K20Q L80I
  VARIANT 24: Xaa= Asn, Lys or His
  VARIANT 38: Xaa= Asn, Lys or His
  VARIANT 83: Xaa= Asn, Lys or His
APPRLICDSRVLERYLLEAQEAEXITTGCAEHCSLNEXITVPDTKVNFYAWKRMEVGQQAVEVWQGLALLSEAVLRGQAILVXSSQPWEPLQLHVDKAVSGLRSLTTLLRALGAQKEAISPPDAASAAPLRTITADTFRKLFRVYSNFLRGKLKLYTGEACRTGDR

SEQ ID NO: 488 - protein, 166 aa, Homo sapiens
  K20Q L93V
APPRLICDSRVLERYLLEAQEAENITTGCAEHCSLNENITVPDTKVNFYAWKRMEVGQQAVEVWQGLALLSEAVLRGQALLVNSSQPWEPLQVHVDKAVSGLRSLTTLLRALGAQKEAISPPDAASAAPLRTITADTFRKLFRVYSNFLRGKLKLYTGEACRTGDR

SEQ ID NO: 489 - protein, 166 aa, Homo sapiens
  NH3 K20Q L93V
  VARIANT 24: Xaa= Asn, Lys or His
  VARIANT 38: Xaa= Asn, Lys or His
  VARIANT 83: Xaa= Asn, Lys or His
APPRLICDSRVLERYLLEAQEAEXITTGCAEHCSLNEXITVPDTKVNFYAWKRMEVGQQAVEVWQGLALLSEAVLRGQALLVXSSQPWEPLQVHVDKAVSGLRSLTTLLRALGAQKEAISPPDAASAAPLRTITADTFRKLFRVYSNFLRGKLKLYTGEACRTGDR

SEQ ID NO: 490 - protein, 166 aa, Homo sapiens
  K20Q R139H R4H K52N
APPHLICDSRVLERYLLEAQEAENITTGCAEHCSLNENITVPDTKVNFYAWNRMEVGQQAVEVWQGLALLSEAVLRGQALLVNSSQPWEPLQLHVDKAVSGLRSLTTLLRALGAQKEAISPPDAASAAPLRTITADTFHKLFRVYSNFLRGKLKLYTGEACRTGDR

SEQ ID NO: 491 - protein, 166 aa, Homo sapiens
  NH3 K20Q R139H R4H K52N
  VARIANT 24: Xaa= Asn, Lys or His
  VARIANT 38: Xaa= Asn, Lys or His
  VARIANT 83: Xaa= Asn, Lys or His
APPHLICDSRVLERYLLEAQEAEXITTGCAEHCSLNEXITVPDTKVNFYAWNRMEVGQQAVEVWQGLALLSEAVLRGQALLVXSSQPWEPLQLHVDKAVSGLRSLTTLLRALGAQKEAISPPDAASAAPLRTITADTFHKLFRVYSNFLRGKLKLYTGEACRTGDR
